United States Patent Application Publication US 2022/0008368 A1 - sequence listing, part 20

SEQ ID NO: 2 - DNA, 58617616 bp, Homo sapiens (residues 41,249,438-43,420,460 of 58,617,616)
  modified_base (1)..(60000): a, c, t, g, unknown or other
  modified_base (24448981)..(24498980): a, c, t, g, unknown or other
  modified_base (24552653)..(24552752): a, c, t, g, unknown or other
  modified_base (24891257)..(24891356): a, c, t, g, unknown or other
  modified_base (24895791)..(24895890): a, c, t, g, unknown or other
  modified_base (24898314)..(24904771): a, c, t, g, unknown or other
  modified_base (24908590)..(24908689): a, c, t, g, unknown or other
  modified_base (27190875)..(27240874): a, c, t, g, unknown or other
  modified_base (58607617)..(58617616): a, c, t, g, unknown or other
gagtgagactttgtcttaaaaaaataaaacacacatggctgggcgtggtggctcacgtctgtaatcccagcactttgggaggccaaggcgggtggatcacatgaggtcaggagttcgagactggcctgatctgcatagcgaaaccccacctctactaaaaatacaaaaattagccaggcgtggtggcaggcacctgtaatcccagctactcgggaggctgaggcaggagaatcgcttgaacctcacaggcggagattgcagtgagccgagatcgtgccactgccctccagcctgggcgacagagcaagactccgtctgaaaaaaaaaaaaaattaaaacacacacacgcacacatgggcgacacaaccaccaccaagggaataccagaagcagagagagggtgaaataccctggcttctccctttctccccgctacctgccagtctcccataagggcctacctcccattggcaaatcccaagaggaaaccactaggaaagggagcctgggaaatgtagttttcaggggccggcccactgtgatacatagtggagcaggagaagctctagaatgaggcatacctggctgaatcatttaccagctatgcgatctcaggcaaatgactttccctctctgagcctcccacctgtcatctggaaaaaaggaccctaatgtccccaccttccaaagctgttttgaggcaaagcacttcatgctgagggtggcaagtaggacatgcttgttaatgtggagtaggactatattatttccattatcagagagggcaggagccatttcagggttacacagcacaggaagtccagggctaagttcttcacacacagggaaggagaagcatagggcattcagattggggctggtggtgaatagagaatgatcctttctgaattacagggcttaaaagcttgggctatgaagtcattacccactcattcgttcattatggagcacctcctgtgtaccaggttattttgtttgttttgctctgttttgttttgttttgaggaggagtctcactctgctgtccaggctggagtgcagtggcatgacctcagctaactactacctctgcctcccaggttcaagcgattcttctgcctcagcctcctgagtaactgggactacaggtgtgcgccaccacgcccagctaatttttgtgtttttagtagagacggggtttcaccatgttggccaggatggtctctatctcttgacctcatgatccacctgcctcggcatcccaaagtgctgggattacaggtgtgagccaccacacccagcctacgttttttgttttttgagacagagtcttgctcgttgcccatgctggagagcagtggcaggatcacagctcactgtagtctcaacctctgaggctcaagcgatcctccccactcagcctcccactggttatagtcttggcctgggtctgaatctcagccgtgcaaccttgggcaagtcattttgcctctgtgagccacagtgtcctgaactgttaaatgggatgatacttgtttgggtccccagggcaggtagggaagtgctgggaagcagcctgggcagttgtgagcaggtggaccctggagccagactgcccgggtttgagatctgcctcttccacctccaagctgtgtgttcccttaggcagactcctaacctttttgtgccttgctttcttcatctttaaaatagagataggccagggacagtggctcatgcctgtaatcccagtgctttgggaggccgaggtgggaggatcacttgaggctgggagtttgagaccagcctggacaacatagcaagactccctctcaaaaaattggctgggcatggtggctcacacttgaaatcctagcactttgggaggccaaggcaggcagatcacttgaggtggggagtttgagaccagcctggccaacatggtgaaaccccgtttctactaaaaatacaaaaattagctgggcatggtggtgcatgcctgtaatcccagctactcgggaggctgaggtacgagaatctcttgaactggggaggcagaggttgcagtgagccaagattgcgccattgcactcaagcctgggggacaagggcgaaactccatctcaaaaaaaaaaaaaaaattatccgggatggtggtgcgtgcctgtggtcccagctactcaggaaggcaagcctaggagttcgagcctaacctccagtgagctatgtttgctgtgattgcatccatcctgggtgacagcgcaagaccctgtctcaaaaaataaaaataaaaaacaaaaacaaaaacaaaacaaaacaaaacaaaaaaccaataaaatgggaatgataatagtagcacctgagaagattaaatgagttaatatatataaagttggccaagcgcagtggctgacgcctgtaatcctagcactttgggaggccgaggcgggcagatcgtgaggtcaggagatcgaaaccatcctggctaacaaggtgaaaccccgtctctactaaaaatacaaaaaattagccgggtgtggtggcacacgcctgtagtcccagctactcaggaggctgaggcaggagaattgcttgaacccgagaggcggaggttgcagtgacccgagatcaaaccactgcactccagcctggacaacagagtgagactccatctaaaaaaaaaaaaaaaaagaaaatatatattttatatatatatatatattatatacacacacacagacacacacacatacacatatcacatataaagtgctgagtatggtgcctggtacttactaatcatgtttgatgaagatgagtgatgatgatgatgatgatgatgatggagtggaggtggagggagagtcctccctctcctcccctcctcctcacgacctttctctctccctcaagttgccatctgcacgaggtcagagctggaggatttcctgagtgaagcggtctgcatgaaggaatttgaccatcccaacgtcatgaggctcatcggtgagagaggggcagattcaaggggtctacaagccccatgggggccatagcagagggaagagccctgcttctggccctgggaagatcaaacttccaggcttcctgctccccgctccttcagggtcagcaggcttccccctcctagtctccctcagcttggaatgtgacctctgatcattcccagaaatagctgaggtccccaggagggctccggaaacgtccctgggaactctgctggaaacagcttctctgcagcttggtccttgccactgccactacccccaaacaatatggtggccagattggatgggtagtgagaaggagaggctggaggctggctggtggggggcttggcttccccttctgcccagcaggagtgacagggctacctggggggctcaggtgtctgtttccagggttctgaacgagagagcttcccagcacctgtggtcatcttacctttcatgaaacatggagacctacacagcttcctcctctattcccggctcggggaccagccagtggtaaggggcgtttaatcattcagtctacaaatattaactgagcatctatcaggtacccagtgctgctcagaccctgggaagaccacggtgaccaggagcttgctctcctggagcatttcttccagcaggggaggggcggatgataaacaagctaataaatacctaagcgagatgatttaaatgtttaagtgctaggaaggaaatacagtaggatggaagataaggaggccaggcagtgaatttgggtggacgtggaagatcttgccgaggaggtgaccgtgaaggagttggggctggggagatgtctggagatctgggcaggaagcgaccccaacagagcgcacagcataggcaaaggctcggaggtgggaatgatcatcgtttgtctgaagaccagacaggagtctggtgggagtgtcagtcaagggcaagaacataggcaatcaagtccaagaggaaggctggagcaagtttataggaccttgcaggccatggagaggggttgggttgaattgtcagggccatgggaaaccactgcgggcagagctaggcttgcacagagggatggagggaggagggatcgcatcaaggactctgttgacctctcctcccacctgccttggctccccagtacctgcccactcagatgctagtgaagttcatggcagacatcgccagtggcatggagtatctgagtaccaagagattcatacaccgggacctggcggccaggaactgcatgtgagtgcctttcagggaccccccccccccaactgctcctgcactccctgagggagttccctccctccttcttaggatggaagcagggctagacacccgctgagggcaggtcagaactcaggaccaggaaagtcagtaagggggtctgggaaggcttcctggaggaggtgagtcctgaactgagatctggaaggagcatttggatgcggagagggaagagaccagaaggtgggctcagtgcacagcatgaggtgagcaaaggggctgaggtgaccgatgggggtggggacacgtgagctgcatctctgtcccactccatgctgggtgtcttgcctggggctgccctttggaagcggccacactggataagaaaatcaaactccccaccaatggacaagcagaaaatatgccagatggggtgcagtggctcacgcctgtaatcccagcactttgggagtccgaggcgggtggatcacttgaggccaggagttcgagaccagccttggtgaaaccccctgtctactaaaagtacaaaattcagcctggtgcggtggtgtgcgcctgtaatcccaacacgagaattgcttgaacccaggaggcggaggttgcaatgagccgagatcgcatcactgcactccagcctgggcgacagagcaagactctgtctcaaaaaaaaaaaaaaaaagaaagaaagaaagaaagaaagaaaaaagaaaatagtaacctgtagtcccagccattcccaaggcttaggtgagaggattgcttgagcctcgagaccagcctgggtaacaacaacgagacaccatctcaaaaaaaaagaaaaaaagaaaagaaagaacaaaaaatcccccaaaagccagaatagagggtaaggggagggtagaaggtggagggaatggaaccacagagttagaatattagtcttggccaggcgcagtggctcacatctataatcccagccctttgggaggctgaggcaggaggatcacttgtacccaggagttcaagaccagcctgggcaacatagtgaatcctgtctttacaaaaaataaattagctgggcatggtggtgtatacctgtggttccagctacttgggaggctgaggtggaaggattgctagagcccaggaggttgaggctgaagtcagccatgatggtatcacttcactactgcctgggcaacagggcaagatcccatctaaaaaaaaattgatgtatattttacatacactaaaatatacacatgcagctcagctcgatgaatttttatgggtatagacccatgtaaccactagatgaaggtaaagaatatttcttagccccagcaggctccttcatgcctcttcgtcttcccaatcactaccgccaagtggtacccactatcctgacttctcagtgctagtttagcctgttctgaaaagtcatacaaatgggatcatgcagtttgtactgctttgtgtctggcttctatggctcagcatgatgtttttgagatggatctgtgtaggggtagtttgctctttttctttgctgtgtggtatggtattccatcatatgaatgtcctgtggattttcttttctttttttctctttctttctttttctttcttttctttctttttctctctgtcctttcttctttcttttctttctctttctctctctttatctccttccttccttccttccctccctccctctctctttccctttctttccctttttttctttcttttcttttttgttttgacagagtcttactctgtcctttagggtggggtgcagtggcatgatcatagctcactgtagcctccaactcctggctcaagctatccttctgcctcagcctcctaagtagctggaactacagacatgtgccaccatgtccagctaatttttaaatttttttgtagagacagggtcttgctttgttttccaggctggtcttgaactcctagcctcaagtgatcctcccaccttggcctcccaaggtgctgaaattacaggcttgagccactgtgcctgtttttttttttgtttgtttttgagacggagtctcactcactctgttgcccaggctggagtgcagtggcgtgatctcagctcactgcaacctccgcctactgggttcaactgattctcttgcttcagcctcccaggtagctgggatttcagatgtgcaccaacacacctggctaatttttgtacttttagtagagacagagtttcaccacattggccaggctggtctcaaactcctgacctcaagtgatccacctgccttggcctcccagagtgctgggattacaggcgccagccaccatgcccagccatgttctgtttcttaatctgggtgctggttacatgggtgtgtgtgtgtgtgtgtgtgaaaattcagtgagctgcttacttatgacttgtgcacatttccatatgtacagtatacttcaagaaaaaaaaatttcatcaaggaatcaaacccaaggaaggaccttagaatctagcaaagagccaaaattgggaagtcctgaggaagccctttgtcccatcctcacttgacagagtgaacaagaagtaaagcagttcccttctggactgggatgaaggtttaggagacagatccccacccgcagccaggacagtgaggggaggaggtgcagatgtgtctgagagccagggcaggcttcctggtggaggtgactgatgccctgaccctgttcctttccccaatccaaacaggctgaatgagaacatgtccgtgtgtgtggcggacttcgggctctccaagaagatctacaatggggactactaccgccagggacgtatcgccaagatgccagtcaagtggattgccattgagagtctagctgaccgtgtctacaccagcaagagcgatgtggtaggtgcactcccgccaagagtggggaaccatgggagggcatggcctgaccatcacacactatgcctgggtggctgtggatgcaagggtcacagggacatgtgggcttccctttgcaggggcttgtccacatgggctgggcatgtcttggggtatggtgggcatctctgaatagtggtgtgtacatgcccaggataaatacaggcccacgtgtgcatggtagcaatgtagacagtttaggttagaagaagctgcagtgattatgcgtgcatgtgcgcacactcatagaatgtggacagccagggtgtgcagagtggcacatgagctcatgtgtccatgaagtgtgtatatgtgtgtgatggtgagcatgtgtatgcatccacaaaagttacttattcatgtgtatacccgtgtcaagtattttttatatatatatatttttctttttttgagatggagtctcgcactgtcacccaggctgcagtgcaatggcatgatctcagctcactgcagactctgcctcccgggttcaagcaattctcctgcctcagtctcccgagtagctgggattacaggcgcccaccaccatgcctagctaatttttgtatttttagtagagacggggtttcactatattggccaggctggtctcaaactcctgacctcaggcagtccgcccacctcagcctcccaaagtgctgggattacaggcatcagccaccgcacccggctaaagtattatgtttctatgaatacttgtgatgctcccagaggatggttgtgaacatgtgtacataagtgtgggtgtacccatgaacctgggtattggtgcgggtgattctgtgcaggagagactgtctaattccctctgcccctcacagtggtccttcggggtgacaatgtgggagattgccacaagaggccaaaccccatatccgggcgtggagaacagcgagatttatgactatctgcgccagggaaatcgcctgaagcagcctgcggactgtctggatggactgtgaggacccttaggtctcccccaacccagaattcattccaaacccctgactacccccagatggccctcacaggtccaggactctctataacccagacagaatccctgagaatgctgagtgacccacttgcccctcaccaatgctctgagtagggccatcactaaccagtggggtgcaaatcagctaaaggcaccctttcctcctttgtctgtgtgggctgaatcagccccctggctccccacccccaagccaggtatccttgggtagtgaataacagcacagtcttacctggcggccctgcctttgggacatgcactcccagagacttctcattccagactcctgagcacaccatgcttccccgacatgctcctcaacacctgagactctctgcaaaacccttcagtttgttttattggccttctccagactcaggtctcctctgagatatttgcaggatccttcagggaatgcttaccaaactttgcaatattggagtatgcggagaaggccgtgacatttagctagcactttgagggtaaagagaggatgactttgggtcaggaggagacagcctggggcgtcagactcctcagtccaccttgggtactccaagagctgagacgagtaaaaataacagctaacattttcatataactgactagaaggcactgttttaggtgcctggcatgtgtcaaatcatttggtccttaccacagccatgtgatgtagataggtatcattatgattcccattctgcagataagaaaacccagtcctacagggagggtaatttatttttatttattgacttgagtctcgctctgtcgcccaggctggagcacaatggctccatctcggctcactgcaacctcccaggttctagcgattctcttgcctcagcctcccaagtagctgggactacaggcgtgtgccaccatgcccagctaattttttttgtatttttagtagagatggggtttcaccaccttagccaggatggtcttgatatcgtgacctcatgatccacccgtcccagcctcccaaagtgctgggattataggcatgagcctccacgcccagtctgggagggtgatttatttgccaaagattgcacagctggtgtgtttgttatctatatccccaaatcaagtagtttaaaacaacaaacgtttattatctcacacaatttctgaaagttggatactgggaacagcttagcagggtgattttggttcaggatctctaatgaagttacaaagatatcactgggggctgcagtcatctgaaggttgggactggaggattgctttcaaggtggcttactcacatggctgtagcaggaggcttcagttcgttgccatgtggacccctttgtggcactgcttgagcttactcacaacatggcaacccaggagaaagtgcgaggaagccacatgccttttatgacctagtctcagaagtcacacacaccatcacttctgccaaatcagaagcaagtcactaagtcctgcccatgctcaagaggagaggatttattctccgtcttttgcagggaggagggtcaaagaatttatggacctattttaaaccagcacagcttgtaagtggcatagccaggctttgatgcaagtctgttctggggagctggaaggtctgttctagcaaaccctcatcagaatactactccatatacagacaggtttcccgagacccttcccagctcctgagtctcccaggacccaactcagaaattcttgggaattcccaaatccccatagatggcctcaaactgctgaggctccctataaccctctaaaatgcccccagtcccctgagtgtcctaaaatgtccccaggcttccagaatgcaccccttctgagtccctgctcaatctcccacccctcattttgctgccctaggtatgccttgatgtcgcggtgctgggagctaaatccccaggaccggccaagttttacagagctgcgggaagatttggagaacacactgaaggccttgcctcctgcccaggagcctgacgaaatcctctatgtcaacatggatgagggtggaggttatcctgaaccccctggagctgcaggaggagctgaccccccaacccagccagaccctaaggattcctgtagctgcctcactgcggctgaggtccatcctgctggacgctatgtcctctgcccttccacaacccctagccccgctcagcctgctgataggggctccccagcagccccagggcaggaggatggtgcctgagacaaccctccacctggtactccctctcaggatccaagctaagcactgccactggggaaaactccaccttcccactttcccaccccacgccttatccccacttgcagccctgtcttcctacctatcccacctccatcccagacaggtccctccccttctctgtgcagtagcatcaccttgaaagcagtagcatcaccatctgtaaaaggaaggggttggattgcaatatctgaagccctcccaggtgttaacattccaagactctagagtccaaggtttaaagagtctagattcaaaggttctaggtttcaaagatgctgtgagtctttggttctaaggacctgaaattccaaagtctctaattctattaaagtgctaaggttctaaggcctactttttttttttttttttttttttttttttttgcgatagagtctcactgtgtcacccaggctggagtgcagtggtgcaatctcgcctcactgcaaccttcacctaccgagttcaagtgattttcctgccttggcctcccaagtagctgggattacaggtgtgtgccaccacacccggctaatttttatatttttagtagagacagggtttcaccatgttggccaggctggtctaaaactcctgacctcaagtgatctgcccacctcagcctcccaaagtgctgagattacaggcatgagccactgcactcaaccttaagacctactgttctaaagctctgacattatgtggttttagattttctggttctaacatttttgataaagcctcaaggttttaggttctaaagttctaagattctgattttaggagctaaggctctatgagtctagatgtttattcttctagagttcagagtccttaaaatgtaagattatagattctaaagattctatagttctagacatggaggttctaaggcctaggattctaaaatgtgatgttctaaggctctgagagtctagattctctggctgtaaggctctagatcataaggcttcaaaatgttatcttctcaagttctaagattctaatgatgatcaattatagtttctgaggctttatgataatagattctcttgtataagatcctagatcctaagggtcgaaagctctagaatctgcaattcaaaagttccaagagtctaaagatggagtttctaaggtccggtgttctaagatgtgatattctaagacttactctaagatcttagattctctgtgtctaagattctagatcagatgctccaagattctagatgattaaataagattctaacggtctgttctgtttcaaggcactctagattccattggtccaagattccggatcctaagcatctaagttataagactctcacactcagttgtgactaactagacaccaaagttctaataatttctaatgttggacacctttaggttctttgctgcattctgcctctctaggaccatggttaagagtccaagaatccacatttctaaaatcttatagttctaggcactgtagttctaagactcaaatgttctaagtttctaagattctaaaggtccacaggtctagactattaggtgcaatttcaaggttctaaccctatactgtagtattctttggggtgcccctctccttcttagctatcattgcttcctcctccccaactgtgggggtgtgcccccttcaagcctgtgcaatgcattagggatgcctcctttcccgcaggggatggacgatctcccacctttcgggccatgttgcccccgtgagccaatccctcaccttctgagtacagagtgtggactctggtgcctccagaggggctcaggtcacataaaactttgtatatcaacgagcttctgtctcctcttgtctccttttagctgtgatgtggccccattccctggcaattcagttcccccatcagaaaaaagaagggcttggtagggtcttggaattctgtcctcactagagagggtagaaatgaacacacagatagacaaaaagacatacaagcaaagagatgcaggttctcagaaacccccagtgaggaactggcatacagatccaggatcacagacacacacacacacacacacacctgttccgccgcaaactaacagacacatgaattaatggacacacccaggaggacctggtcacaaatacagagactgaaactcagacgcatagagtaacacagacacacagaattacacagacacaagcatatttacaaacatgctcaggcagatacccgccacgaataggaagagacacagacctagagtcaagtgacacaaatactcaagagacatgtagagtacaacaggtactcacaaccccgaacgttcagactgacatagaaacacaggcacagaacacctccgatcatcacggacccacaaagggcctccagcgaagaccagcccaccgtgtctggcacgcactcgcgagcgggcgttcgcgggtgtggccggcagcaaatggagaaacccttggcagcgcccggacgccctccagtggcggctcctgagaaccggggacagttcaatccgggccacaaacttttttagaacaaatcattgtgggaagctgggaggagagagagagagaggaagtcggacgtgggcgaggggcggggtgtctggactggaacctctgggcccacgtgagtgtctgtcccgctgctgagtgggtgctgtgtgtttgggttgctgtagtgttcgcttgtagtgcaactatcctgtgttatctttattattcgatgccgcctgcctctgcggaccgtagtgggcacatctacactgcagcggggtgccttacccaaagcagatcggaattggggccgggcgcggtggctcacgcctgtaatcccagcactttgggaggccgaggcgggcggatcacttgaggtcaggagttcgagaccagcctggccaacatggtgaaaccccgtctctactaaaaatacaaaaattagtcgggcatggtggcggggacctgtaatcccagctactcggaaggctgaggcaggagaatcgcttgaacacgggaggcggaggttgcggtgagctgagatagaggccctgcactccagccagggtaacaagagcgagactccgtctcaaaaaaaaaaaaaaaaaaaaaagaacaacaaaaaaaagaactggatgcgtctgatctgacgcacgcctgtttgtttacgactgcggggtgtgcctttgtctgagtagagatagtgtgtggcttttgcgggcttaacgtgtggctcaggaggcagtgggagtctgcatcatgtatcccgattgcgtcttactcgagttttgttttgagttagaggcgacaggtggtgcagcgttagacactgggaagctctgtggcttttgtattcctgagcgcgaaggttaatgacggatccgtggggttgagcttgtcggtacagacgccagacagcccgatttacgggaacagccgattagaggattcgggagagcggtcggtgaacttctggatgtctttcgggaggggaaggctctatggtcgcgtgcagagcgcccgttccacgtcaggtacccgaccatagagcaaggcggccgcggactacccaagggaaggggaggccgtgtcctttacaacttgcctcccgttgttagtctagtttctatagccaaaccttcgggactctctcaactcaaaattttgcttttcctaaaggcaactgggttccttccagattacgaactgtgtatccacttaatctctatttcgtatacctcctcctacagcgaaatttgtgaggcagtcctctgaagcacggccaatctggtgaacttttcctaaaatgagccatcgctaccagctttagtgagctaagacaataactgcgattggtgggcagattgttttgaaaccgccctaacggcaaggggcgggctcctggtgaattcatctctttccggtttcttaaaggcaacaggaaggaggggtttctgccgaccctccatttgattggttctagtggttttacccgctcggactcctcaaggggcgggagatgtacaccaatcggaatgtgtgttacagagacacttagtttgatgaaaggactgcgcaggaaaggccgtgggacactcattctgagatcttaccgttgattggaccaaattgttactcccttattttcattggaccttacggcagccggcgcgcgagagttacccaatcagcaagcgctccgcctcctgccttttcccgccctccgctccggcctcggcttcgacgtaggccaacgcttcctccccagtagctcctaggccttctcgtggccgttgttttgaaaacggcgctctgattggctaggtttccgggcccgcgcccgttgccccacgcactgaccaattggcactcatgtaacatcggacgaggcacgagtgaggggggaggcggtggcggcggccattttgagccgctgccgccattggagtgggccccccccctttcccccttcgcctcctgacaggaaaggtttaagggggacagagccctgggaggccgggccgggctcgggggccaccccgggggcccgggccatggatgtgcgccgtctgaaggtgaacgaacttcgcgaggagctgcagcgccgcggcctggacactcgaggcctcaaggccgagcttgctgagcggctgcaggcggcgttggaggccgaggagcctgacgacgagcgggagctcgacgccgacgacgaaccggggcgacccgggcacatcaacgaggaggtcgagaccgaggggggctccgagctggaggggaccgcgcagccaccgccgcccgggctgcagccgcacgcggagcccggcggctactcggggccggacggacattgtgagagtgcgcggggcgggggccggggagcccggagcctgggccgaggaaagggctgtgggacgcgggagtccagcgcctgaggtcggggagacgacctgaggatcgggggatcccgctacccgccgccgaaaaggatctggggaccagggccccagcacgaccggagggtggatcctgacactcagtgcaggggggacactgggggaggggcctctgggtttcggaggtgagggacgggggtggcggggaggattccgtaccgtagggatcggagaccggaaactgctttctggagccgaagagagtcggaagaacaagaggttttccgtttgggttggggagggtctcgaaaatggggatcctagggtacggagctccgtgggcttggcggtcgtgctagcccagcgtgtgggctggggggtggggagccgtgtttccagggtggggaaggaatgtccaggtgtgcggggctgcgagagttctgaggaaggaggatcctggaatatgccgctggatgcgatcctgggcgttctcctatttgggtacgggggtgggtgggagaggtggaggcgctggtgtctgtggctggggagggtcctaatggactcagtgctttggagtttggctagtgagcatttaggggctgcgggagattgaactagggggcacccccatctctcttccggggctggaaggccacccttgaagcaggcacagcctggacattaggtgctgggagatctggggactttctggttggcttctagaagaggtatagggagccctggtgtccagaggctggcgggggagaggatgctttcctggacaaaggatctgggggtctagagctaagaaaactgagggcaaataactcttgaggctgctgctgactggtctggagctaactgtggggtttttggagaacagagggtagctgggggtgggatgggggcagatgagttggtaacattccaagtggatgaaatatgtggcgggagacagaggatcctgtgtccagcacaggagtacgtatctggcttagcgaatatggggaggggggaggccgtagggagcaaagagaaagaaacctgttgacttcactggaggcctcagagtggagtgtggggaatgtttctggacctgagcgtctccaggagaaatctcgacggttcccagaagcagttatttgtgtacccagggagtgggggccctcggggagcagcacggaactcttcatcagccaggagctgtgactctgggaatgggttcgggtagacctgcggttgtctgaggagaggaaaacctgatatgggacggcgtgaatcttcagttagaaaaaaagcagctttcgggccgagtgcagtggctcacgcctgttattccagcactttgggaggccgaggcgggcggatcacgaggtcaggagttcaagaccagtctggccagcatagtgaaaccctgtctctactaaaaatacaaatattaaccggatctggtggtgtgcgcctgtagtcccagctactcgggaggctgaggcaggagaatcgcttgaacttgggagggggaggttgcagtcagccgagattacgccattgcactccagcctgggcaacaaaagtgaaactccgtctcaaaaaagaaaaaagcagctttctttctcttttttttaaatacagatggggggtctcgctatgttgcccagggtggtcttgaactcctgggttcaggtgatctcacctcggcctcctgaagtgctgggattacaggcgtgaatcactgcaccaggcctcagggcagctttctagtaggactgggaaatggggggactggaaaggttaaggagtaagtagaagggattctggcgtaagagtttgtggagtttttctgaaaagagggcaccctgggacttggggctaaggggataaggagagaaatgaggtaacagaagagacaggatttggggttggaattggatacttgttcataagagaatttcccggagggaggagtgtggatttggggtaggcagtggcctagagattatcgaggacccaggtgctggaaagaggacttcccattgcagagacttgtgaagaaaggagtgggcctgtgtgtgtgtctagagcaggagggatcgtggcaggaatgcctagcaagaaagggtagtgggttagtagtgacctggtggtctgggcagagagtcatctctgagaggaaagcgaattaggtgctttggagcgtagactctagactaagacagacttcgtttcaaatctggcttaaagatattggcaagtcacttcacctctgtgggcctggtttccttaatgtgtaaaatggggttaatcaacaaatagtgtgttcacagcccctccaacccctgaggggtgttatgaatgagatcacatgtgaagggcttatcactgggcctgccttttatgagaagagggatgttttagagaatggagaaggaccctagaattatagcttctccaggaggggctgcctctgtgaacacaggagagagatgctggggaaaagaggctttgtgggaagaggagcattgtgcttggagcctggaagcagcagaatagtttgaaagggccccatattccaattaaggagataatgctatttcttcctctctcccttacttgctacaacaaagtcctttgagcccccttcatgcctcccttaagccctccttcaaccttggtaaacagaccggtagcaaaccacatgacctgtgactttcctccctttgggctgcacctggtttgtgcccagatgtatttatcctctgagaaggaatccgatcagttagcaagtggcagaatagtctctccttccctttggttctggctcacggctcctggcatagccactggtagggcccttggggccctaactgagagctagcccctggggaggagagcctgtatgctgcccatcctagctttctaaagttctctctgggtttggctgcaaggttcttgagggaatttctggttttagttccacctctgagctttcacacgtgttatcccaaccccagtaacattctccattctcatcactgagtcattacctgtgtatcctttgaatcaaggcttatctgttattttccaggtccctttcttcattcctggtactactttgtagccttcaacacaatcatattaaatttttgtgtgtctttaagatttgtctgtctcactaaactgaaggcttcagtggggcaagcttgtcttcagctgtatcccaggctctggagtatagtatgcatgccatgaatagttaatattattattcttaccactcttagttgagctcctggacctgcagatgccttctggatgctttggtccagggttcttcatgaaccgcccctctaattggccatttttaattttgttttaagatgccatggacaatattaccaggcagaaccaattctacgatacccaagtcatcaaacaagaaaacgagtcaggctacgagaggagaccactggaaatggagcagcagcaggcctatcgtccaggtaggaaaatacacatggttcatctctttggatggaaacaatctacatggagcctttaccccctgcttagagcgggtcttcccagagaaactgtgcatcttttttcttgggcagttcatctaaacattgtcactctggcaagaattgtttaaaggaaagatctcagtcctatttccaagtgttgggagaggggaggttccatggtatctgtaaaaaagtgatgttagtatcagccgggtgtggtggctccctcctgtaatcccagcactttgggaggccgaggcaggtggatcacctgaggtctggagttcgagaccagcctggccaatatggtgaaacccgtctctactaaaaatacaaaaattagccaggcatggtggcaggcacctgtaatcccagctacttgggaggctgaggcaggagaatcacttgaacccaggaggcggaggttgcagtgagccgagatcgcgtcattgcacttcactcagtctgggcaacaagagtgaaactgcatctcaaaaaaaaaaagatgttagtataagcaccctggagagttgagacccctagactaatacttgaatcttatttagaatcttagaatgggggagccagaaagagccttctaagtctaatctggtatttctcatgttctgaagattattgtttcaggggatattattaggggattctcagaaaagggttccttagccaaatgtgtctggaaactgtagcatgtgctatatcgtctcttggaaattcactgtgcttgttagaacattaaaggctctgagaagtccagaatttaaaaaaaaaaaaagaaagtgtgtgtcaggcctcaggccaggtgcgctggctcatacctataattccaacactttgggaggccaaggtagtaggatcatttgagaccaggagttccagaccagactgggcaacatagtgagaccccttctctacaaaaaatttaaaaattagccaggcatggctatgactgactacatgcacacacctatagttaaagctactcaggagacaaaggtaggaggatcacttgagcccaggagtttgaggctgctgtgagctatgattacactactacactccagcctgggtgacagtgcaagaccctgtcacgaaaaaaaaaaaaaaaaaaaaaaacctaaaattaaaagtaggttagaacacagtggctcatgcttgtaatcctagcgctttaggaggccaagtcaggaggatcacttgagcctaggaatccaagactagcctggcaacatagtgagacccctgttgtctttagaaaaaattaaaaattgcctgagcatggtgacatgcttgtagtcccagctactcagaagactgagtcaggaggatcacttgagcccaggagttcaaggctgcagtaagctatgatcgtgcacggcactgcagcctgggcgacaggaagaccttgccttaaaaataaaaacaggccgagtgcgatggctgttacatgcctgtaatcccaacactttgggaggctgaggtgggaggattgcttgagtccaggagttcaagaccagcctgggcaacataaccctgtctctataaaaaataaaaatattacctgagcatggttgcacaatcctatagccccagctactctttttttttttttgagacgaagtctcgctcttgttccccaggctggagggcgatggcgcgatctcagctcactgcaacctccgcctctcgggttcaagcgattctcctgcctcagcctcccaagtagctgagatttcaggcgcctgccaccacacctggctaatttttgtattttcagtagtgacggggttttaccatgttggccaggctggtctcaaactcttgacctcaggtgatccgcccgcctcagcctcccaaagttctggggttacaggcgtgagccactgaacccggccaagtcccacctactctggaccctgaggtgggaggatcacttgagctaggaagttgaggctccatgagccatgatggcagcactgcattccagcctgggcaacagtaagcctctgtctccaaaaaaattttttttttaattaaatttaaaaaccttgtgtcttcttgggctggtgttgctgaaaatattttttttaataaaaaaatagacaaaaaaccttgtgttgtatcgtttaaacttaggatttcccaatcatgttaagtatatgtctttacagaacaaagttccccatgatgccaactctcccttcccttttttttttttttttttttgagatggagtctcgctctgttgcccaggctggagtacaatggtgtgatcttggctcactgcaacctctgcctcccaggttcaagtgattctcctgcctcagcctcctaagtagttgggactacgggcgtgccaccacacccagctaattttttgtgtgtttttagtagatgtggggtttcaccatgttggccaggatggtctcaatctcctgacctcatgatctgcctgcctcggcctcccagagtgctgggattacaggtgtaagccactgcgcctggcctctcctccccattttatagattgaggagttggcttgtccgatggcagagctggggctacaacctagcatacttgctcccaggctagtcctcttggttaataagcagcattccttatcatttgtgccttactatttggaaagcagggtcccactattgagaactgatggagcccggactgacccccagttttgtgctgcttttactgtgttgtggcctcccagtgccttttcttagtgtatctggttgattttgtctaacgccattctggttcatccacaaagttaaatccccagacatttcttgtgggtggctcagaactttactgaatgtaggttaaaccgcagatttgtgtcaggctctgtgagacttgtaggatcattcagccacaggagaatattttctgtgccgttatccacagacattcatcaggagccctgtgtgagcccaacctattgctgggaaccagggaagctctcttcaggatggctgagcaccatcccagccctagagaaccaggagacttttctgagagatgtggtccacatgccgaagctggggagtgatccaaaatggtctggggttgaatgcagaaatgagtagatgtgaatgagcttcagcatcagggattaatgctgtgggagaaatgaaggtagcctacatctgtggtttgctcttggttaggcactgattcctggagtctgcctgagactaggacttacccgtggtccacagcacggtatcccatcctgactttctgttaatggtatgacttaaagaggttattgcacctatgggatggcttaaccggagtgattctggcctcttttggtagggtaactaaagcccgtagagttagctgcaggaccacagtaccctgttgaattcatcctctccccctcccttgccagactgaagaagctttgtaagaactaaggcagagaggttctttgggaagagaaattggagaatttagggtcatggtatctcagatcctaaccctgttctccagtatggccttcttggctggctcagcaggcttctgttgaactcagcaagctgcctgtgcccagcccttcatcactgtagtgaggatcctgctcacatctctcaagggaaaagggaccagaaaagtgatagctggggagcttgcgagtgtcttgaccatctgaatttgtcttgacaatagaaatgaagacagagatgaagcaaggagcacccaccagcttcctcccgcctgaagcttctcaactcaagccagacaggcagcaattccagagtcgaaagaggccttatgaagaaaaccggggacgggggtactttgagcaccgagaggataggaggtgggtgtatgaggcagcagtcacccttgctctggtaggtttctatatccatagcctcgtgcttgctggggacatttgcactaacctagaggggctgagtaaagattccctctgctttcacactcttcctgtcccttcccgtacttgctaccagattcagctttcctaaacttttggtccttcccccagttcctcccttcttacctgcagggtaacttctaaatatcttagactttcacgcgtgagatgccagcctgcctgttctgtcctttgccttactgcccctgcagtcagctgcttgatacccgtaatgaaagaaatatctgtttcctaacactactcccaaatacacatcctcttcccattcatccactcattcagtcagttctcacagtgctgtcacgaagtgcccactcttgggctggacactagcaacatacagatggacagtgggttttgccttctgttgttccagtgtggggactcagacacatacactagtaagccacaacctctgaggtgagtagtcaggatgcaggtgagtttcaggagttcagaagagggagcagcctctgctttggtcatttcccttccctaacaagcccttccctcctttccctccagaccaagtccttcccttccctccttccttccttcagttcctgtctgaagccttttgcaattatgaaaactaggaatggccactgtactcatctggactagtcatctgacattctatttcctatctggcggagtccaccttctaactagcttgttactgtctgagacagggcctggatctcacaggctatgatttaagttaggacatggatcccacctcatatggggttcttccactgcctcccacagagcagaagcctggaagctacttactgatggagagcaaaggaagaacactcgctctgatcctgggctggcagggaaagtttcctagaatggacttaacatgtgatgagcacagctcatccatgttagccctggcctggcgaggccagaggggccctccaccagagggaagcctgctgctgggagagtcagcagccaaatgggcatgggctccccatctgtgcatgcagtgcactgcgaccacccagactgtccaggcaggaccctgagtgttagattctacctttctacccttcttcctcgttcctgtacagcagaaaccaacagtgttaagtcccttttttagcgttttggtaggaaaatgaatatcgtttataatttaggacactgaaaaaaatgggtcatctcaaattcttacagatgtaggattttaagaagcctggtacatggatagatagtaattattgggatttatataggctcttgcacattccccttcctggccagcacccttttgggataccacagcctccaaacagtaacagagatcagtgtggaagtggttgtcaacatgcagagggtatggatcagaatctttgggtgtaaaaaaagagtgaaaaaattccctaaatgattctgatgccccccttcagcagagcatgccttcttcaatccctgtctccaccgtaggagttgacggtcattgctctccttgcaaggatgtagggtttcagagttcttttgcccacctctgtggaaggaaatggagattcaggaagcagtctggaggccactcatagattacagcagaacattcattttctttcctttgtgctcatccattgttcttgtatgacttaacccctgtttctaatacaggggccgctctcctcagcctcctgctgaagaggatgaagatgactttgatgatacccttgttgctattgacacctgtaagtctttggagtgtgcatctaattctgccttacagtcagtatggggaaattgtggtcttgaccttcaccagaatccctgctgggcaccgtccaaagacattgttagtccacatgtgagacacggcttagctctggagcaagagtactggtttggaggcaaaagacctactcccaactctagcagtgggaccctgggcaagtcattctacttctctgagcttcccttcaggaaggagtaaatctgctgtactaacctcagaggattttcagggagactcctcagtggatataggagcaatctggaaaaccctgaaccgccctgtacacacaggggttgtcatctaatcaggaagggaatctgagtgcagctggggaaacttaactctttgacaaccagttcccgtttccatcagctgctcaagttcctggtgaaaccaatgccactgtgtcctgtgaggcactaacctggcccgccctgctgtctgtcctccagttcagttttctttccactggataagtggctttcaccttcactgtgcatctgagcatttggaggaattattataaaggtcctttcgctcagacctcctagtcaagagtctaagtggtcgagcctatgaatctaaatttttacatgcacccagaagcccaatcaggtctgagaacactgcacttctcaacagagcagaagataagcagcaatttattcatctatttctacagaagcttctgtttataaagcactggctacatgctttagtaagagataaaaatatacacaatctctaatatcacaagctctcgaaaacaacatctacccagagtagaggtaaacattgtttaaaaagtgttgggtggcagtggttcatgaggcagcgtctagatgaaatgcaaatgtacagatcatgacggtcagcctttagagaaaggagagcgcctcatgggagggatggtcaggaaaggctttcttggaggcgtgactggctccttgaatattgagaatattgagaagggtaagagcaacagtaggagagtcctaggcccatgaaaggaattaggagcctatggggcacctgggcattggttcctgggtggcaggtgtggatcagggtcagatccctgtatagctattggaaacagaagtccggttcccaaattgatagaattaccacagagggcggtaggaatatatggtggtggtgattaacctttttgtattctaaaaactagtttgagcctgggtaacatggcgaaaccctgtctacgaaaaatataaaaatcaccctggcatggtggcatatccctgtagtcccagctgttcaggaggctgcggtgggaggatggcttaagcgcaggagaacagaagttgcagtgagccgagatcatgcctccgtactccagcctgggtgacaaagcgagaccttgtctcaaaaaaaaaaattaatttgaaactgctgaggatatggaccctatccctagcaaatacacatccccaccaaagacatgtgttgacaatttctgaggatacccctgaagccccatccttggatcccaccagataaagaaccccagttcctctctgaggtcatacaggccaatttgcaatactgcacatcctccctactcaaagggagagaggttgaggggtgtgctggttccttttgaaactgcccccatgatgtgttcactgtgtactcctggtcagcacttggggaagttccctctgcctgcttctttcttaggacttctaaaacatcagccaggccgggcgtggtggctcacgcctgtaatcccagcagtttgggaggccgaggcaggtggatcacctgaggtcgggagttcgagaccagcctggccaacatggagaaaccctatctctactaaaaaatacaaaattagtcaggtgtggtggtgcatgcctgtaatcccagctactcaggaagctgaggcaagagaatcacttgaacccgggaggcggaggttgcggtgagccaagatcgcaccattgcactccagcctgggcaaaaagagtgaaactccgtctcaagaaaacaaaacaaaataaaaacatcagccaactgtgggcattttccttcacagataactgcgacctccacttcaaggtggcccgagatcggagtagtggctatccgctcacaattgagggctttgcatacctgtggtcaggagcccgtgccagctatggggtcagaaggggccgtgtatgcttcgagatgaaggtgagtaggagcaagagaaggggaagggacagagaagtccatccattgtaatatcctgataccagccaccttggtcagagctgcaactgcaaaagagattggattgtgcaataccatgtccaagcagacaaaactgtgatgaactcaagacaactacatcattgctaaatatcatatcagaaaagcaggccaaccatgcattgcttcatcaagcagatatttccttggtgagatttgacccaggtattatgtagtcaaccagtgtagtgatgacatgtttgtagaactgagaaaagaagttgtttggaagaaaagtgatctagaaagaatagactcagatgtcacttattaaagggaggccagagggagaacagggcaaagaactgccagcttaggccagcctctgctgtcatctctccacagttccatgtcaagttatgtttatgaaaataatagatgctcatgtttaacaaaagttcagacagcacagaaaagtacaggataaaacaggttattctcgccaggtgtggtggcttttgcctgtaatcccagcacttttgggaggccaaggcaggtggatcacaaggtcaggagttcaataccaaactggccaagatggtgaaaccctgtctactaaaaatacaaaaaaattagccgggcatggtggcgggtgcctgcaatcctagctattcaggaggctgaggcagagaattgcttgaacccaagaggcagaggttgcagtgagccgagatcacgccactgcactccagcctgggtgacagagtgagactctgtctcaaaaaaaaaaaacaaaaaaacaaaaacaaaaaaaacaaaacaggttattctcatgtcctctcagttcccatcctaccatcctactccctggagggaacttctgtgttaacaatttcttacctgtggtttgtgtatccaaacttactgatgatagctaataagtatagagctctttgcatgcacaagatacagcaccaagctctttacatggattatctccattaatcctcacagtaccatctggaaacaggtactgttagccccagtttttagaggtagaagctgaaacacagagggttatattttattgaccacgacaccattgatgtaagttgtgcattattttatgtacctctcatagagaaacactgcaacaaaataaactacgcagtgttttctttttttgtttgtttgtttttttgtttttgagatggagtttcactcttgttgtccaggctggagtgcagtggcgcgatctcggctcactgcaacctctgcctcccgggttcaagcaattatcctgcctcagcctccccagtagctgggattacaggcatgtgccaccctgcccggctaatttttgtatttttagtagagatggggtttctccatgttgatcaggctgggcttgaactcctgagctcaggtgatctgcctgccttggcctcccaaagtgctgggattacaggcgtgagctgccgcacccagcatacgcagtgctttctcatcacatttattgtaaaatggatcctgatttcagagattttaaaatgtgtgtctgaaaagccagtgaggccacaggtagatacggatattcggcagtctagtcttttaatacgaaattaagtcagaaggctttttttttttttttaacttaatactgtatcttggacatttttccatagcagtacattagcccaatgtactgctttgctccttgttttttgtttgtttgattgtttgttttgtttgttttgttttgttgacggagtttcacttgttacccaagctagaatacagtggcgcaatctctgcttactgcaacgtctccctcctgggttcaagcgattctcctgcctcagcctcccaagtagctgggattacaggtgcatgacgccacgcatgcctaattttttgtatttttagtagagacggggtttcatgatgttggccaggctggtctcgaactcctgacctcaggtgatccacccaccttggcctcccaaagtgctgggattacaggcttgagccaccgtgcccggcctactttgctctttttaactgttgcatcatattttgtggcatggatataccataatcagtgctttattgatattttttctgatgttaaaatatatatatatatatatatgtgcacatatatacatccaatgctgcacagaatgttgcatatacaaatacagtcacacatacgtagacatacttgtccacatattagtgtatctataggatgctgagttatagagcatgtgcatttatggggttttgttgtttttttcttttaatgtttttgtaaagatggggtcttgctatgttggccaggctggttcctaactcctggcctcaagccatcctcctgccttggcctcccaaagtgttgggattacaggtgtgagtcaccatccccagccatttacagttttgatagagacttctagattgccctctaaagacactgtaacagtttatctttctactagatgttacaagagtctcttaaactaaaacataaccgtattttgaaatgcctgtctctgtggccctgtactctactgatccctttggaggccctggcttcgattcggttcaacaggcttttcagagctgcttaaacgcttcttctccagcaagaaaagccattgctattttttaatgcctgatatgcttccctcctatattggctcataacctacggcctccagagaagcaaccctgagcccttttgtcctctttcctcagatcaatgaggaaatctccgtgaagcaccttccgtctacagagcctgacccccacgtggtccgtatcggctggtccctggactcctgcagcacccagctaggtaaggaggggtcagctatgcagtccagagaatagagtgactgtccctacccttggattttcaaggctcctaagcttccttttccagcgtcagacttagaatagaactaggctgaagtggaacaggtacaaggattaggtatatgccactgtctctgtcatgctgtattcaactgagaggactatggtcatgaaacaacttttctgtgaagaatcaattcttatccttcatcttttaggagagggtccaaaattctctttaggaatctattccctttctgtaaaaaggatcagtgtctcctgcccttaaaccaagctgctgataagttcccaagctccattaagttctgtctgtattttctgtccggagcctaacctagaggaaaaaggggagcagagaccagtgaggccagggctagttgggagaggggcaggggctgcctattgaaaggttttgaattttgcgggtccccaggcttcaatgaccttctggtcccaagtgactgattattctgaccaatgctgacacctcctgccttccgtttatgatcatacaaacgttccaattatgaaaataatatgtgttgcgtataagaattcaggccatacagaaagggaaaaatgaaaatccttcctaaacctgtgagagaaactaaccaatgttaacattccatttgtagtcttctggacatttatttttttgtacatctttaaactggatcacactaggactactttgtatagccttgttttaatgtatgatgggcatatttttgtaaataactgcagctttttgactactgcataattttccattttatagttgcattatttaacaagtccccttctgtagctcatttaaacttattgcaaatttttgctgttttaacacttgagccattatcctggtccataattgcctgaccacttaagactaatctttaaaaatagatgatattctcactcacaagtgtttgtttaaaaaatatgttcacatggacttagagagtggaataatagataatggagactcagaagtgttagggggtaacaaggtggaggaggatgagaaattggttaatgggtacgatgtacattttttaggtgatgaacaccctaaaagcttgaccactatgcaatctgtgcatgtaacagaattgcacatgtaccccataaattggtacctcctcaaaaaggtagatatgttagcaccaaaaaaaaaaagtatacagttttcatttccatatgtgttagcactttttatttaagactcataagtcatctcatcttatctctgtctccgttttgagatgtaggtggtggcagttgatagggatggggaaacagcccaggaggtcaagcaccatatccagggtcacatagctggtttgtagcagaacgagccctggcattcatgcttgtcggcccctgcttttctaacagcatactctttgggttctgcccggaatctctaactcaggtgtcagccagagcccttgggatctctcagtcatatcacttcagcacccagttctgtagcctgaggaaatctagtacctttcccaggggtcagtcctcatggtctccaggagcaaaatccagccccttcactgatttctaccacaagtagactggactgaatattgggtgtcacaaggaagggttgcatctcagcatacagccattctcctccatcccaactcctgtcttccttcctccctttcttttcaaattctcccctctgtgcagagttattcagttgagctcctactcccagactggacaatgaaacccatcaagccctccaagttctacatcattaagggcttcctttcacccttccccacccctattttaaaaaggcatctgattaataaaactagtaaagaaaatgatttttttcttcaaaaataaaagtatgtggcagccattgaggctgttatgaccatcgcaggtttaacctgcctttgcctatttcttccgtcaggcgaagagcctttctcctatggctatggaggcactgggaagaagtccaccaatagccggtttgaaaactacggagacaagtttgcagagaacgatgtgattggctgctttgcggtgagtgctagcagcctgtgggagttggcagaaccagatgttgggctacagacttctttttcaggatacctctatccattgtctgccccatatccagccactctcgccatacttctttgtctctgcttgacagactggaatgtttactgtcattttgtgggaaattctgtcattccatctcctctggtcttgtgtgcaaagttttcagatgacaccctgaagaggtttggggacttcaggtgtgcatagccttcctccgttcctaggtaccagagtaacattttctaaacaaacctaggaatttcttatctttcattgctaggaaatagcctgtctgctcctgaaggcagtggtattggctcttgccccatgttggcatcatcttatcccaaaacttctccctttcttcatctcacattggttgagccaggcttcctacaatgcactgccttctggaagagtagagatgatgcaaaacagaacagctgttgctgccatacttcagtctttgagaacagtgaccagcagtcaccttgctgtgcagtatggctgtcagctctgggctggactccctggacccagttatgttcttccattcaagccctgggcaatttacccttcttgtttttcagttccctctaaatgagaatctttgcacctacctcagaattttgtgtggagtcattaagttaatccattaaaagcacttataataatgcctgacacacagtaagtgctcagtaaataccacttaatactgttaacattaggagttataagagatgtttgtaaaatgtgccgtaaggccccagaggaagtgaccacctggatggattcatcctctgaagcttattcttttgccttccttcatatttgtacacatgtactcttccttcttcttttttatttatttatttatttttgagatgagttttttgctcttgttgcccaggctggagagcaatggtgcgatctcggctcaccacaatctccgcctcctgggttcaagcgattctcctgcctcagccccctgagtagctgggattgcaggcatgcaccactacacccaactaattttgtatttttagtagagacggggtttctccatgttggtcaggctggtctcgaactcccgacctcagatgatctgctcgcctcggccttgcaaagtactgggattacaggtgtgaaccaccacgcctggccccttcttctttttttaactttgagataaattcaaactcggaaaagcttgagaataaagaattctcacagggccttatccagattctaacatttgccacatttgctttaccattttcatgtttatggtgtacatacacatagagagttaactcttcaacaatgtgtttgaattgcactggttcacttatgtgcatatttttttctttttttctttttttttttttttgagacggagtctcgctctgtcgcccaggctggagtgcagtggcgggatctcggctcactgcaagctccgcctcccgggttcacgccattctcctgcctcagcctcccaagtagctgggactacaggcgcccgccactacgcccggctaattttttgtattttttttttagtagagacggggtttcaccgttttagccgggatggtctcgatctcctgacctcgtgatccgcccgcctcggcctcccaaagtgctgggattacaggcgtgagccaccgcgcccggccatttttttcaataaatatattggaaacttctttggagatttgcaacaatttgaaacaacagacatagcctagaaatatcggtaagattaagaaaaagttaagcatgtcatgaatgcataaaatataagtaggtactagtctgtttcatcatttactagcataaaatatccacaaatctattacaaaaagttaaaacttatcaaaacttgtgcacacagactctacatggtaccattcacagttgagagaaatgtaaacaaacagtacagtattaaatcataactgtttttattttatttttttgaagacagattattttctctgtcacccaggctggagtctcgtggcgcgatctcaactcactgcaacctccgcctccggggttcaagtgattcttgtgcctcagccacccgaatagctgggattacaggtgtgcaccaccacgcctggctaattattgttttttgtttgttttgttttgagacggagtcttactttgttgcctaggctggagcacggtggcgcaatctcggctcactgcaacctccgcttcctgggttcaagtgattctcctgcctcagcctcctgagtagctgggattacaggtgcacgccaccatgcctggctaatttttgtatttttagtagagttggggtttcgccgtgttggctaggctggtcttgaactcctgaccttaggtgatccacctgcctcggcctcccaaagtgctgggattaccaagtgtgagccactgcacctggcctaatttttgtatttttagtagagatggggtttcaccgtgttggccaagctggtcttgaactcctaacttcaagtgatctgcccacctcggcctgcgaaagtcctgggattacaggtgtgagccaccaagcccagccaactgcataaaattaaccagcgcatactgtaataattttgaagccacctcctattgctattatggtgagctcaattgttgcaagtttctacttaaaacactgtgtgtcatacatcttcacgtgagcagttcttttcggtaaattgtgtatcacagtaaaaagtgatctcgcaattcttgtgtattttttaatcatgttactgcaatatcataagccttgagtagcaccatgggatccatacgaagttccactagtgatgctggaagtgttgctcagaagcagaaaaaagttatggtattacaagaaaaatttgaattggttgatatgcactatagattgaggtctgcagctgtagttgcctgccatttcaagattaatccagcataaggaccactgtaaacgaaaaaaagaaaaaattcccgaagccatcactactgctgtgctagcaggtgctaaatccctgcactttttatcatatattgacaatgcaaggccggacactgtgactcacacttgtagtctcagcactttgggaggccaaggtgggcagatcgcttgagcccaggagttcaagaccagcttgggcatcatggtgaaaacaaacttttaatattttataaacataaaaattaactgggttggtgatgcacgcctgtagtcccagataggaggctgaggatcgcttgagcccaggaggctgcagtgggttatgattggcccactgcactccagcctggatgacagaatgagactctgtctcaaaataaataaataaaactgcagcttttgtgtaggtacagagttgctataagaaaggcatacctgccgggcacggtggctcacgcctgtaatcccagcactttgggcggccaaggagggcagatcacgaggtcaggagatcaagaccatcctggctaacacagtgaaaccccgtctctactaaaaatacaaaaattagccgggcgtggtggccagcgcctgtagtcccagctactcgggaggctgaggcaggagaatggcgtgaccctgggaggcggagcttgcagtgagccacgattgcgccactgtactcccgcctgggtaacagagcaagactctgtctcaaaaaaaaaaaaaaaaaagggcatacctataggctataattcaagaaaaagtgaagtcattatatatgacaacataaagcaaaagaaaggggaaagatctaaagctgctgaatttaatgccagcaaaggatggtttaataactttagaaagaggtttggcttaaaaattctttacaggaaaggcagcttctgccaacgaagaggcaacaaacaagttcccaggcatcattaaggtataattgaagagaagggatatctgcctgaacagatttttaatgccaagtgcagtggtatgatctcagctcactgcagcccccgcctccccggttcaagctattctacctcagcgacccaagtacctgggattacatacttgcgccaccacacctagctaataatttgtattttttgtagagatggggtttcgccaaactcctgagctcaagcaatccgccctccttgacctcccaaagttctgggattataggccggagacaccatgcccagcaaattctgtcagattgatgatcaggactgttacttataaagctggtaactctcaaaccctaaatcctcaacaccagttgccagtcatttggttgtacaacaagaaggtgtggatgatgaaaatcctttttctagattggttccattgatgctttgtttctgaagttaggaaatacctttccaatatgtggttcccttttaaaattattttgatattggagaatgccaccaagaaccccatgagtttagtacagaaggggtcaaagtggtttatttgtccctaaacaatgggctgacccttgaactttgcagggattaggggcaccaacccccatgcggtcaaaaatccacgtatagtttttgactcccaaaaacttaactactggctgagcgcagtggctcacgcctgtaatcccagcacttcgggaggccaagctgggtggatcacttgagcccagaagttcaagaccagcctgggcaacataaggaaaccctgtctttaccaaaaatagaaataaaaattagctgggcctggtggcacacgcctgtggtcccagctactcaggagactgaggtgagaaaaaaaaaaaattaatagcctactgataacataaacagtcaattaacacataggctagtgtctacaatttttatgcactcatatgacatacctaacttttcctttttttttttttcagtatttctagtcatagggatctgagagttttttcaaattgttgcaagtgtccacaaatattttcagtatattgaatgaaaaaagtacacatgtaagtggacctgcccagcttgaagccagtgttgctaaaggtcagctgtgttttcatctgacccatttgagaggaggttgcatacatcatgtcttcattactttggtctgtattccttcttttctttttttttaataaatgagacagggtcttgctgcattttcacaggcggtgatccctcttctgatcagcatgagagttttgacttgctttgtttcctaccttggctagttcacccctccttaggcaacctgatggtccctaactcccaggaggtcaccatatcaatgccgaacttagtgtggacagccgattggcatagtgcactacagcccagaactgggctcaagccatccaccccaacctagtagctgagactgcaggtgcacggcactgtgccaggctcggtgtgtactctttttttttttttttttttttttttttgagagaagtctcactcttgtcccccaggtttgagtgcaatggctttatctcggctcactgcaacctccgcctccccgggttcaaacgattttcctgcctctgcctcccaagtagctgggattaaggcgcctgccaccatgcctggctcatttttgtattttttagtagagacggggtttcaccatgttggccaggctggtctcgaactcctgacctcagatgatccgcccgcctcagcctcccaaagtgctgggattatagatgtgagccaccgcgcccagtcggtgtgtaccctttttgagacggagtcttgttctgtcgcccaggctggagtgcagtggcgtgatctcggctcactgcaagttctgcctcccaggttcaagtgatttttttgcctcagcctctcaagtagctgggatcacaggtgcacaccacgacatctagctaatttttgtatttttagtagagacagggtttcaccatgttggtcaggctagcctcaaactcctgacttcgtgatccgcccacctcggcctcccagagtgctaggattacaggtgtgagccaccacaactggctgattcttaagagtaaagatattaatgacagtaaagttattaaatttaaaacttgatataatgctattatctactgcgcattcaaattttgtcacttgtcccaacaatattctttcgtccagttgagtttctagttcaggatctgatctggcctgggatcatattgcattctcttgccatgtgtctttagtttcctttagcctgaaacagtttctcagcctttttttgcatttcaggatctcagtatctttttgtttttgtttttgagacagagtttcgctctgtcacccaatctggagtgcagtggcgcaatctcagctcaccacaacctccacctcccaggttcaaacgattctccagcctcagccgcccgagtagctgggactacaggtacgcgccaccacacctggctaatttttgtatttttagtagagtcggggtttcaccatgttggccaggctagtctcgaactcctgacctcaggtgatccacctgcctcagcctcccaaagtgctgggattacaggtgtcagccactgcgcccggccctcaatatgttttcaataaaacatttttaaaatgaaaactgtgttcatactctacaaattgttcggttttaaaccttgcatttttttcccattgaagagtaaatcttggccatctttccctgtccacacagacaatatatagatctagctcagttaaagttgtttcttaatagttaatcattgtgaattgattttttcaagaatagggtttccaaaaaaaaatcgaggaatgtaaaaggggatacagtgtaaagtcttctttagacaccccccctcccgccccacccatttttcacatataccctccccagcatgtgaacccactggtactcggggtttcatctttttttttttttttttaacttgtatgtcttgggggtctttttatttatttaatttttttgagacagagttttgctcttgttgcccaggctggagtgcaatggcatgatcttggctcaccacaacctccgcctcccagattcaagtgattcttctgcctcagcctcccaagtgctgggattacaggcatgcgccagcatgcccggctaattttgtagttttagtagagacagggtttcaccatgttggtcaggctggtctcgaactcccgacctcaggtgatctgccctccttggcctcccaaagtgctgagattacaagcgtgagccaccatgcccggccttggtggggatctttttatggtactaccaagagagcttctttgtacttttatattgtctgtagtcattgtatgactgtaccataattgatttaacctagcgcctccctttggtggacatgtcgttacttttgcagctttgtatttagtgactgtaatggctgtctagtattctgatgcaggggtttgggtaccctgctttaatttagcccgtcttcctgttagtggctgtgaaagttgtttcctggaacagataaatgcggcttgtcttttttccatttactggagtaacttggagatctttttgtagccccacatatggatctcctgtgcaatttagccactcctacttccccattggagcacattttccgtgctggcatgagcattttgcacatagaattttgcattcttgtgggaatgtagttgtattccttcttgaaagttagattctaagtcaaaggtatatttttaaattttcatagctaccaccaagactacactccaaacaggttgcagtaatttaacttgtcactgtgtgacagtgtttgccaaagtctgttctttcagagtatgaggttcttttggtatgtggcagtatggaactctaggccttgactcttgcttcaaccagaacatctctgcatccagtcttaagattccttatatagttttctttgttcagaagataccacaactttaaaaaggctcagggtgaggagttggtgggggtgtaaaaatcattggtctcctggaacaagaggggaggacattggtgtcaaatatcaagtcctcaatttgcaaaacaaaaaggtaaaacagccttccaagtggagaacagaataacccatttcagcaaaccataaagagtatgatacttagagcctagggacaacagaaagaggtgtgagacaccaggctataaaaatggcaggctctgaattatgccaggcttcaggagtttgggtctttaggcctgggactgacacaggagtgtttcagcaggaacaacaacacaactccacttgccttttggacagatggctctgttggtggtagatgggttggttgagggcgccggtttctgtgcattatgggaagttcctatagtgaagctggtggccataaggaaggctaactaacaccaacagtcatacctgctctccatggtcttttttttttttttttttttgagaaggagtcttgctgttgcccggctggagtgctgtgacatgatctcggctcactgcaacctccaactccctagttcaagtgattctcctgcctcagcctcctgagtagctgggattacaggcactcgccaccatgaccagctaatttttgtatgtttagtagagacggagtttcaccatgttggccaagatggtcttgatctcttgacctcatgatctgcccacctcggcctcccaaaatgctgggattacaggcgtgaaccaccacatccagccgctctccatggtcttgacgtgggtgcatgcttagagatgaacaggcatgagggcctctgacacagagctgtgccctgtgagcactgaggaggttaatgaggaagctcctcaagggagggtgcttctgtcgcttcttgaagggcaattcccaaggtggtcacctgaatagagaaagaaattatactttcatatcagaaagcgaaccgtgtattttgcttcagtctgctatctaatctcaagttttgagccttttcttctctgagatgggcatttagaaaaatatttaacaaacgttttaaaaatataaattttaaaaaggcaaaaaaacactaagaaaaaaaagagcctctcgtatcctgcagccaaagcaatgtttccaaaacacagttttgagcaggctgctcctctattcaaaataagtcagacactctgctctgccaccagcatcaagttcaaattcctgcggtaaattagagtccctcacatgccgaggtaggccgtgtcccctcccaccacttcagtcccagccccttatttctagcacagtgcctgacattttgcagtgatagctcacattccttgtgtgctcactgtgtattaaatgtactagcccatttaacagttagaataaacataggctgtataaaatattattaccccgcccccctttttttgataaagaaacaagatgaaataacttaaccaaggccacaagttagtaaatggtagaactgaagccatccaccttctaaaatgggatcataggctaggcgtagtggctcacacctgtaatcccagcactttgggaggctgaggcgggtggatcacctgaggtcaggagttcgagaccagcctgaccaacatggagaaaccccgtctactaaaaatacaaaattagccgggcgtggtggcacatgcctgtaatcccagctaattgaggcaggagaatcgcttgaacccaggaggcggaggttgtggtgggccgagattgcgccattgcactccagcctgggcaacaagagtgaaattccgtctcaacaaaaagaggggggatcttaattactaactttagcaattcaataagtagttgttacagaataaatgaatgtggtccctgcatggctcttcagctgttcctgaattacttccccctcatcttttatgcctcagccaatctgaccttgtgttctgtcactgctaggcttatatacaagcaactgagaaacctcagaaacttgcttctaggtaggtcatcttactgaattatgatagagtgtccttgtctcattccccactggtcgctaagctctgtcggtcccagattatgcagacatgtgtatcagaaagagtacgaactcagggaacatgttgaacaagctgaactcagttcgaaaaggccctgcggtggctttccttcatctgttatattcatagactgccctttctgggtttcttttgtttgtttttgtagagatggggtctctttctgttacccaggctgtacttgaactcctggcctcaagcatcctcctgccttggctgctcaaagtgatgggattataggcgtgagccactgcacctgtctcctcatcagttttcaggacaggactggaccaccttttccttcgtcttcatctcagtctaggcacaagactcaaatacttggagcttcttaaaattacctgctttaggacaggtgcagtggctcaagcctataattccaacagtttggcaggccaaggtgggaagatcacttgagtccaggatttcaagaccagcctgggcaacataacaagaccctgtctctacaaaaaaatttaaaaattagccaggtgtggaacatgcctgtagtcccagctactcaggaggctgaggtgggaggattgcttgaacctggaagtttgaggttgcggtgagccctagctgtgccactgcactcagcctgggggacagggtgagaccctgtctcaaaaaaaaaaaaaacaaaaaaaaaaaactcttgcttacttgcttcatatccaccaactttggggtcttaggcaaggaggactttgggctggacattctctgagatgttcactgatgctgcccagcttacctgtatgttggggaaggatgcacttcaatctggaaagctgtccacattctactccctgcatctactgtcctcacatttgactcccagtgcctatggcaagagttggcaatcatattcctttggctttttctcctaggattttgaatgtggaaatgacgtggaactgtcttttaccaagaatggaaagtggatgggcattgctttccgaatccagaaggaagccttggggggtcaggccctctatcctcatgtcctggtgaagaattgcgcagtggagttcaacttcggacagagagcagagccctactgttctgtcctcccggggtttaccttcatccagcaccttccccttagtgagcgtatccggggcaccgttggaccaaagagcaaggcagaatgtgaggtgagtggggccagaatgtattggtggccaccttgctgccaagacagaggagacacacacacacacacacacacagacttgctgcgagagtagccttggggcaagtggccactttgtcccagctcctcagggttggactcagagctgaaaagctgctctgagtgtgaggtgaggggtgttggtgtgacctaagttgaagtcggagaggctacctaaatctcagaaagattgcatcttcttcttaagtgaggccagaataggggaaaaggaggcttttcttacagcagaaaaggacactaggcgcttcttggggagtgcactgtgccaccaagtgttctttttttttctttagagacagggtctcgctctgtcacccaggctggagtgcagtggtgcgatcacggcttactgcagccttgaccttccaggctcaagtgatcctcccacctcagcttctcgagtagctgggaccacaggtacatgccaccatgccaggctaacttttttagccactgagcctggcccaccgagtgttcttgaaggaggttgagtaagttccacctctcacccagagctatcaaaagataaatggcctttgggaagatttgattccaagagctatactagtgtcttttttcttaaaacaatatttttcttgtatgtgtaagttatttatgcttgttctagaaaattaagaagtaaaaaatttaaattttcataatgccatcatctacaaataagtttacttgcagagttttggagttcatctgttctttttaatgtctaagtgcctgttttatgctcacaaacatttatcattgagattctatggtataagcattatgataccctgctcttttcacttcacattattttgtgagctttatcccatcacataaaaacctctctttgaacatcattttttcttttttaaaaatccttcaagggaatgaacgtcattcttaatggccttacaaactcgccactcccccctagtcgggcatttaagatgcatctgtgtttaccaaattctaaatgtactgattagatacaattcatgtccttgtgtgtgcagctctgttcctatttcatacttaaagaaagttgtaccacttctacccactccatggggccagtcccagtacacagccttccctgggctattgcagggggcggggaatgggtcacataatcctgtaaatgggctgggtttggtggcaaatgcctataattccagcactttgggaggccaagaagggaggaggatcccttgagtataggagtttgagaccagtctgggcaacataaggagactctcatttctaccaaaaaaagagagaaaaagattagctgggtgtgatggtttgtatctgtagttctagctactctggaggctgatgtagaaggattgcttgagcctgggagttcaaggctgcagtgagctgtaattgggccattacacgccagcctgggcaatagagtgagaccctgtctcaaaaaaacaaaatactataaatgctaatgatgacagcacttggttttttgtttttgttttcccccgaaagtcctgggattataggcgtgagctaccgtgcctggccagcacttgacttaatgctcaccctgtcccaggcactgtgctcagagtctgacaagcctgatctttttgaatcccgataccagtactgtgaggtagatggtattactgcttccgctttgtagaggcagccacagctcagaggtccagagtcacactcacagtcaccaccgagccaagtggtgccataccaccatgccgcaacaccttccctgtcttgttcttgtagattctgatgatggtgggcctgcctgctgctggcaagaccacatgggccatcaaacatgcagcctccaacccttccaagaagtacaacatcctgggtaccaatgccatcatggataagatgcgggtaaggccagccactggactctccttactcacctccaacctactgagtgctgccctgcaactaaaatcactcacccctcaccaattcctgcccgcaggtgatgggcctacgccggcagcggaactatgctggccgctgggatgtcctgatccagcaggccacccagtgcctcaaccgcctcatccagattgctgcccgcaagaaacgcaactatatcctagatcaggtacttaatgatgaccattgtgtcctcaggagaagggaggggaccccttgcatgcctgagaatctccctctggtccctttcttttttcccccgtaatgatgatggactgctgtgctagtcgggggggtcagaccttgtcatacatgatgacatggtactacacacagctgagcctggactgggatcatgatctaggcctacttactcagactcatcagcagccccaaagaacatcaggtaagaactgtttagcaaaatggaaggagtatggatttccaagcctgagagactggagcttgaatgccagctcggctactccctagctctgtgcctttgggcagctgactttattctctgaatctccatctcttggtttgtaaaacagggatctcaataccatctgcacccctaacgcaggacctggcacttagtagctggtgattattgttaaatactctacagaataggtagagtagctttcatgccaacagcagtgctgtaaggtaaatgctattattgcttccgtcattttctcttcacaaatacgtatgactggcaggtacatacctaagtcatattttctacctacacttcagttaatggtggagttcttaacatcagggaccttggaacctttgtatttgaacataaatattgtatgcagctgcaggtgtatcctttttatgaaaaagaagggaaaaaaaaacagttttttgtccctatctttcagcattctcaaaaggatgagtgacccaaaaatcattacagattcctgtctcagagtaatgagttccacatggttattgcctatgcaacgtcattgcctattgacatttgtcctgaaggctttcacaagtaacaaagggtgtctccttattttctatgtttggggatctgtgaatgagcctctgttcccttcagccttgcatttgtgctttcttaagaacctgtgagtgagcaaatatgtaaactaagtaacaccctgcccttgtagccttcctgaagtgccttccatacgtgtaggcctggatacttggtgaccatgagttcaaagggctcctgataagagtggaggtggggacagcgtttggctttgtcagaatggtagtttgcttgttagaaaggaatcgccagagaccgagttgccttcacataggaatgaggatcctacacaaaacagttgagcacaggatagtctaaaagccatccgtggttatccccccagctcatattgtgtacaatcagtgttctctccgctttgaagatttgtcttttaaacccttggcctcactttacctgatcctccttgtcggggcattcaagaatttttttagtctgtattgaccccagttggactcattgtcgtgaaagggagagcagtaataccattttaacactctgaggatacatacctcttttggataccctagccagtattcctccctgtctttttcttggtttgctggttaaatcagctgtgaaactcatttcaaatatgtggcctaggggagaatgattatagtctagagtggatcgtctaacatctctgtccaggatgctgaagtgggttttctctggaagccaggcccatgacagctttgcactctgaagacctactgtcagccttcttggctgctgctggcttgttcagggacagggtctagggctgtaccaggtatgcctgtggtcttcagggctaccagcctcctgcttaagggacatgtgggtcaggccaagagatcttggccaacaatgagacagagaacctaaactctgaaggctggggaggagggttctctggttaaccacagattggaggattgcctcggggcctgaagccataggctactcaggctgagggagggattgtaaagccagtggtttcacctgttttggcctaaaccccaaaagtgggttccagaaaactctgggtatgagaaagagggagggggaagttgtgtgtttgtgtatagagggttcagagcaggcccctggccaatcctggcacttccattccaccagctttggcggtgacaggtaagttgatgatgcatagctgtctcctgggctaggtggaatttccaaaggggaaacccatactacaggcaaaatccctgcagttcctggatctcagcccagaaccatcttttgcctttactggtttttcctgagtggtcagatctccccagatttggctcttccagcctcctgttatgtaggttggccttagaaatgctcatccttgagagggaaggagaggttgtctgcagaagccaggtgggcctttgtaagccaggattctgtgtttgtctggccaggactctaactcctaccctgggatgtatgtgattgggcacaaactctcaggtatatcggggctttgacctacattctgtgataacctgagtagccttttgagatgatgtgggcatcacagctgtggaacatcagaagaggaaaaagaggtagaccagagaggaagctgaagcctctgcagaggactataggactgctaagtcacgcactcagtgtactgatagatcacagctctgctgacttcccaaacagccatagtctagaatggttggggccatggtgggaatttggggaagctttctggaggtggaatgtctgagtcggggcacagaggatgattaaaagagttggggctttgtcctgaggagagtggggagtcatggttaggttttcatccggaggaatgtggataaatttgcctggctagtaaaaggctgcagaggagagagaaaggtggagtagaaggccacattgcttcaggtgtctctttggggtcctctgttggaggtgggaagcctctggaatgagatgctttctggccttgtcccagagggcctcaaaatggagtacagaacaggaactgactggcctgctgtgaggcaaacaagttgcctttctggaggcttctggggagcctccgcagggccatgttgcccaagcccaccccagagtagggcactgttgcctgggagttccgttagagggctctaacagctagagccaggccaggcatcagttagaatcagggctggatgggttgacgtcacagtcagaacatgtcgttctagtcctcatttgcatcctggtcagcaggtgccacactttcgcctgaaacagaaacccagggctagaatagtctcccaccgtaacctgtgtcttatttgcaggccttggaggaaggatgtttctttccttcatccccagccagccatccctagagcctgaagcccattccattcttgacacaccagccagttctcttcctataaatgtggttcttttgactggaattcacctcactctgagcccaaagtaaatctttcctcatcagccttcactttgctcctcagatctagctaggtttctcctgctgccagtatgaccctggtgagctgtgacaagtgagagtagacagggacagtggggcttgagagatcctgggctgtcacatcatcattcgtacctgctgtgttccctcctccctccctcagactgttatacaccaaaactccccatatagcttctctgagaaacccaactcttgtcccttagtccatgtcacagggttcagggaacacagacagccacattttctcttggaatcaacatcttcaagcagggtgggactgggagaagcagaagctaggcagagggaaccaaagcagctggaaaagctgacctagctgttgtgctggtctcatagcaacagctgccagcagcccccagcgaccacagaagtgctgggctggcccaggggctgtgacctcactgtgtttgctgtggcaacagccaccagcagctaattccctttcctccaggaaagccaagtatttgcatttctgctggtgtggtttagatactcttcttcccttccccaaacgaaggagtaagtggagggaggtgcagtcttaaaaaccactgctgagttgattctcagcacctcaattccaaagtgcctgagaagccatctctgagtctacccacttccaaggacaaaggccagctatttataagtccaatctgctccacctccattcctctcatcccatgaagctgcaggggctagccgtcttggcagcattgcttctcttctctgtcccctcatcaggacattgacagggcagttgtaccacatggaagacctccaggactgtcactccatgccctcgcagttcagaggaatcaaagtaggatcacttaggggcaaaaaaaaaaaaatgcagaatggtctggggccatattcaccctggcacctacctactctgagcttttgtgtcagaagaaaattatatttagctgaggaagccaaactctttcttcctatgaccagatgccacgttctgctttggttttaggaatggagtcaaagaagagtagtggggagaggggacttaacttttcctctgtaacatgatgttccttttcaaaccatttgtggcccaagtgctctttgtgggccggtgtccaagaccccaagaacagtatgtgtgtgcctgtcacccacatgactgcccacatcctccttcgtgagggtagggacactttccctgggggacagggaagaacattttttcctggcgcgtgtttcagggccagaggatctggttagtttaagcaactgcacccacggccccagaacttccagcagatttgtgctggagtccttggcccctggctaatccacatccagcaccctgttcctatgtcttagaagacgatctcttgaaaccttgttttttcctcaagcttcaattttccttggtattttccattgggaagcctctcctggatagtcagtcctgtaggtcttattttcagatccactctgggtgttgacttttcactgcccactcctttggcactagccagagatttttacatctgcaaatgctctccagagccaggacgagggtgatgatccttgtctttcagacgaggaaatttgagactcaggctacttggggacttgtctgagtctcacaaatagtaaagggcacagcggggatttcaagcccaagtttcttccccaaagcctgtgttcattccaccctgtctcactgttcctgcttttctgcttgggaggtcactataagcttaaccttttctttggtctgagttgcttcaagtcaacatgacagtataaatatctacccagtgatgaccacatcaatggcagctcacagttgttgagtgttggctatgagccagggcctgggcttagacgagggcttttactcacgtggactcattcagtcctcacagcaaccctaagacatccatgccgttttcccttttcagggcttgattttacagaggagcaggctgaggctgggccatcccagtgcactgcccgcttcctgtcaaggtgtcttctgccctggaggccacctgtgtccccctacttgagtagtttcttgcactttgtcaattgctttatggacattctcttactcagtccttgccagcccagggagggaggcttttcaaccccgtattacagatgaggcaactataaggactggccaaggtatgttagtagccacaccaggacttgaccctagactctttgcacccaagcaggccacatcttcagaatacatttttttttttttggtccatttgtatatacccctttacagactgttttccccatctgtggcttctttcttgggtccctattagagccactaaaaaattgtttaaatgcagttaaaaactccttactccgtttctgctgagttcctgagtttccatagggagggtacctgtataggtgcctgggtcttacttctagaggttcaggctcaggaagtctcaaatgaagtttgagctgctcactttttaagtagtgtcctcgtgattcaagtatacaggctgagtctatggaaccctgaatccaacagaggtaggccccattcccaaagggcccgacatgaaggaggtgttcggtaaatggaagccgatgttgttactgctctcaaccacatatgtgctagagcaccgctctgccagcaccagcccaggacacacctgccatcacttagaggaagggaaggaaacattaggagcaaaactgcacttgcgaaaagcagagtctcctgatgtgtagagcttgctggttagaagcttgtgggtgaggctgatgtttcagagaaggactgagggaataaaagaaccaatgttaataagaacaaactacaaaactgtccaaaggagctggttaattagtagcatagctaatctataggtattacacagccattaaaaaagaatactgcacagaaaaacttcagagaaagtttcacgttacatgaaaaagcctcaggaggatgtgcataatacaattctttttgtgtaaaaaaatcacatagatatttctaaaagtgcacggaagaaattcattcttcattctctctgggaagtagggctggcactaagggaacacaggggtttttcctctaaactttatgccttatactgtgaatttttttaccaagagtatgtattagcttttagaatagggaaaagaaattgtaaggtccagtaccaagaacaaataggattaaaaagcaaagtcccaaccattaggaatcctttgccctgtgcctgtctgcagccacttacctaagtcaattcatttgctgagggtgactcaagaatcttctaagtaaagaagagctgtttcctgagtttctctgcttacaaggagcactgatatccttttctcagtccctggcctacataatacccctcagaggaaaaaaccaactcttaatgtaccatctcttgcctcttctgttaccttacccttagacaaatgtttatgggtcagcccagagacgaaaaatgagaccatttgaaggcttccagcgcaaagctattgtaatttgtcccactgacgaggacctaaaagaccgaacaataaagcgaaccgacgaggaagggaaggatgtcccagatcatgcggtcttagaaatgaaaggtaggaaatgagtgcttcccagaggaacgtcaatgcagggtcctggagagaagaagctctttactcagtttgtccttccctggctccccagtgatttcttttttgatcttactctttctttgcttctgctttgtcccttccttgtctaccacagctgtgaatggaaaagctacccatctgtcttatgttggggttttcaggctggatggggctggggcagcacaagggaaaggatgtatgggagctaaagctgaaagtcctgtgtgctcaccctgcctctggtcccagatgggctgactgtgggcaggcctcagtttgtttctctgtaaatatagggatggtgatgccatctgtctgacccattccctggggtgaggcctgagggagctgtgcactgtgtctaggtgggtcttagccacctcttcagaaaacggaggagtctttgttagcccctgacacttagcaggctgaggggttggggctttgtctacctctttctctctctctctgtttttttttttttttttttttggagagggagtcttgccctgtcacccaggctggagtatagtggtgcgatcttggctcaccgcaacctccgcctcctgagttcacccagttctcctgcctcagcctcccgagtagctgggactacaggtgtccaccaccatgcctggctaatttttgtatttttagtagagatggggttttgccatgttggccaggctggtcttgaactcctgacctcaggtgatccacccgcctcggcctcccaaagtgctgggattacaggcgtgagccaccgcgcccgcccttctgtctatgtctttcttattcactattccagttttcttcaccttctcccttctggaaggccactcttctgggtggaggggaccagacttcagaaggtactgacctcttcttcttgttctctttggggcacttccttcctcctagccaacttcacgttgccagatgttggggacttcctggatgaggttctgttcattgagctgcagcgggaggaagcggacaagctagtgaggcagtacaacgaggaaggccgcaaggctgggccaccccctgaaaagcgctttgacaaccgaggtggtggtggcttccggggccgcgggggtggtggtggcttccagcgctatgaaaaccgaggaccccctggaggcaaccgtggcggcttccagaaccgagggggaggcagcggtggaggaggcaactaccgaggaggtgagacatctcacacacagcactctccactttctgttcccaggttggggctgggctttgactgcttattcaatcagcaactgaagttttctgagctccagctgtgagttatactctggtagaaaacttgaaacaagtcagacacggagacctcagaaacgctcccactttcccactccctggacgctggttatgaagccctttgcccatttgcatatcacagtgcacattctgtcacattgctgtcatttttgtgaaccttcccccatctgaccatgagctccttggaaataggatctagatcaaaatctattggaaatgggggctacatctttggccaggtctgaagaggactagatgtgactcgttcatggctgtcaccagtgcttagcttcctctcattttttttttttttttttttgagacggagttttgctcttgttgcccaggctagagtgcaatggtgtaatctcggctcactgcaacctctgcctcccggcattcaagcgattctctcgcctcagtctcctgagtagctgggattgtaggcaagcaccaccacgcccggctaattttgtatttttagtagagatggggtttctccatgttggtcaggctggtcttgaactcctgacctcacgtggtccacccgccttagcctcccagagtgctaggattacagatgtgagccaccgcaccctgccagcttcctctccttgagcatctccttcctgcatattcaacagctattgagatgctgggacacagaaacccaggactgccttggtctctgcctcaccattcttgcagtccagtgaatgagacaaacctgtcataagggctgggacaggggagtatgcccgggggtctagagaatcccagaggacatgctttgttgttcaccttgagttcttgctctgcgcctggccatgccggctcacagtagtcaccaagacaacccagttccctggggttgccatttgggaatgatggcgcctttcatctggatttctccaacacaggtttcaaccgcagcggaggtggtggctatagccagaaccgctggggtaacaacaaccgggataacaacaactccaacaacagaggcagctacaaccgggctccccagcaacagccgccaccacagcagcctccgccaccacagccaccaccccagcagccaccgccaccacccagctacagccctgctcggaaccccccaggggccagcacctacaataagaacagcaacatccctggctcaagcgccaataccagcacccccaccgtcagcagctacagccctccacaggtgagagaatgagtgtgtgtttgtatgtagtgatcgcacgtgtgcttttgaacctgagcaagttaggtggaggcggatctggggaaatcaacacatgccccagctactggtcttcactctaacctctagcctgcccttctttctccctggccgtgatcttgactcagatggaccctacacattcccagatcccctccaaacccaggagtaaatgtagaccttcccagaacctgctcttctcccaccaccctcaaggggatgggctgtaagcactgatccctccagcaagtacattattcttggctagtgtcactaacctcactaaatccccaagaaagcacttgactggagtcaccccttgcccaggctggctgacctctttgtcttttggacataataaccagggcactaaggttgctgaggacttgccctctgcacagagagcttcaatcctgagcagctccaggctcagttcccattcttggaaagccagtgccctggctctggtatgcacaggctcctgtaaaccagagaggttttcagttatcgcacagccatttcccaagcactttcctcatgccgggcctggaatcagctgccaggagaccaatggatggttcccaggcccagctaactagaatatttcttagaacaagagttgggcaggcacagatccaaacccccagccccacaacatcctgtttctgtgagcttggacaaatagcttcccgtctctgggcctcattttcctcataaaggtgttagtagaagtcccttccaaggtttgttgtgaggaatgggtggcactatagctctgggactaggcagacctggggtcaagtcctttttccttggcccagaaatttcatcttgagcctcagtttctttctctttaaaatggggctagtgggacctacccctaggttctatatggagattatatgatgtaatgatccaacctgtacttgggaagcacttagtcaattgccactactgtttctcagcagatcttccagtaacaactaccaccacctgttgagtacccagtggtttatacacacaagcttattggatacccagggcaagctaaaggagttgttcttgttctattgtgattctcattttataaaaaagaaaactgagatttcaagaagtgccgtgtaccttgctccctgggggtctcagagctggggttagagtccacatcacagccctggggcttgcccttcatcctgccctaccatggcatggagctggctctcctccttctcagcccacaaacaatgtccactaggcaagggaagggcccctgtgggccaaccacttaaaaaggccctttttccatcccagcatttcacatctgcagatttcctctatttcacagagctttggcttttttccctccactttccagccgagttacagccagccaccctacaaccagggaggttacagccagggctacacagccccaccgcctccacctccaccaccacctgcctacaactatgggagctacggcggttacaacccggccccctataccccaccgccaccccccactgcacagacctaccctcagcccagctataaccagtatcagcaggtaggtgccagactgggggccaactggatggagagacttccatgggcccctcctgggtgtgtattcccagacttaagtccctgcttatccctaaaaagacagcctgctggcctcggcctggcgttcatctggtgcagccattccatttggtcaacacttctgcactggttgctaggtaattggtatcctagccccctccacagtctagcaagtgaaggggaagggctggcctaagtaccaggggcctcagagtcctctttcagcaccatagacagggggctccaaatcctgctgcaggttggtgcccaggcccccatacctgttactaaatcttttgactatgatatctagctatacccaaaaggcactgggttgacaagctgagacctgggcttcagtccctaactgcctacctgtgtggtgtcaggtctttccaaggtgccttgatttctctgtcaggggacctgtgttcaactgttgtcactgcagctgtctctgccctaggtgagggtggggctggtggggaggctaaatgtgtggtggatgcaggacaacttggtgttcttggtttctttccccagtatgcccagcagtggaaccagtactatcagaaccagggccagtggccgccatactacgggaactacgactacgggagctactccgggaacacacagggtggcacaagtacacagtagccagtgtgacccagaggctcccggaggcccctgccggcttcctccaccagcgcctgcctcggcccctcctctgcccccgccagatcccgtggtgctggggatggggtcatcccagggctgcctccctccagcccactgcctcccctctgaggggcttccttcccctccatagggccaggcatttttttctggattcaaacaggcaacaatgaccttttattttctgtttgtccccacctccccagccttccacctcctgttcttcctaccttcttcctttttgactaaataatccccacctcccttgatcatacagtgaggctacagtgactgaggggagaatcccctcctgttcactctcccaaccctgctccagcccctcagcttcccagaccctcatgcagttggttgtaaattctcccaggagctgttttactgtctacttttcaggattaaaaaaaaaatcaaaacttaaaaaaaaaaaagtttaaaaagcaaaatggggagggggaggaagcagtgacttttttttggtaattatgcgcttttttttaatttttagaatttgtctttttactgtgggtgggctgttgatatttcatcaagataagcatttctttcctgagttcaggtgactgaggaagagccacaaaacaaaacacaacaaaaccaaaccacagaatcatctttaacccaactttttatacgatgccccagttccccataactttgcacacaagcttctgtgttcagttgaattgtaactgctttttgtatttggagagagtgactattgaacttgaaaccttttattccgggcgtcttggtagtttctggtgggattcagtgggtgagagggaagaaggggaggttggggggctccttcccttcagaacttgaagtttctcccactgcctcctctccagtggtctcccaggtgccagacccaaaagcttttcctacagtgataccctttatttttacttccccttgactcatatgttttaacatgattttaacaaactgcacttattaagaaatgtgtttgccctgttttgtttggtttcgttttgttttctttgaataaatgacatggcacctcctagcaggaaggaagcagggttgaaaccctgaagtgttactgcagttggccgttaattggggtgggggcctctttaaagggaaattatttactcattcattaaacaacttaactgagggattcatgtgcctggccccgattttggtgctaaaaatgcacgcttaaacaagggtccctggtttaaaatccactagttcatttttaaagtgcttctcttgttctctacctctcacagtctaaaatccctccaggagtttttgagtaaaggacatggaacaggcctctaggtggagggatgggtgggactgatggggcagagaccagggctggtttgtttggcatcatcactgggcatccacagaccacctgcctcaggcctggcctgtgtgcagcacggaggacagttcctgcctgttctgtgtttggggctcatggggattccaggagcttcatgtttcagccagtgtgtgtgagccacctgctgtgttcttcagctgtcctggacagtgctggggacatagtatggccacggcagtcctggaccccgttctcacagagctcccactccagagagaacaaagacctgccagcaccaagtggtcagctgtgagagcctggggtggtgtgcagggagggcttcctggaggagtgagccagggtaaaagactccagattgcatccccatggcccatcttccccttccttagcaaccttatgtcttcgttccctcatacatgctgtgttcctggctccttgtgagagacaatgctgggccacaggagaagccaattcagccccaatcttccctggtgggagctcagagccttgtgaaggggagatgggcaacaaaaacaagggagggaaactgactagtctcagaatctcgggtagggcatcagaacgtgagaaggaaccaaggttggtggctaaaagggaccctagaatgcgccagagaggaggtggcagggcctttagtctggaaagtccccttcccttcatgtccatatgctgggctacagcgccctctgctggcctctcctggtaatgcctaggaatctgggttggtaaatagggacctccttggctttcttccacaactccagacctcaagggaatgcaaatggggaagctcttcctctgttctcagccagtttttctcacacgtctcatctccagtcccttgatgcccactcccttcagaataaaggaggtcaagccacttactatggcttatgaggccctgcatggcctagcacctggtaacatcgctggcgccctctctttctgctccccctttgaatatcaaatcagtgtttattttgttctgaggagccataagtcctttttggaacccacaaatgatgccatgaaccactgcattggagaatacagaggtacatggaattttgcataaaaattcatgaggttctcaaaacctccacagcccaatcatggctttcaagttagagctcctttcctatgccctgaccgtagtgaagtgcttgcagcaaccagaaccgtccgtacgtgccatcctcctcaagactcttccctaccttcctcttaacccagctcctactcgttcttcaggtcttagcttgagggtaccctcccagaaagaaggcttccttgaccctccagcctggggtggacagctccctcagccctctggatccatcaaagccctggccactgagtgacatgtctgtctactctgctggtaacacctaaatagagccccacccatcccatagggaaataaggaccagagttgtcttgtttcacacctgtagatttcctccaggtcctgggaacacaaaatgggaagttctatctcactatccatctcatgccagccagagacagggtatgatgacggaagtaagccaggctggtggctcacgcgcgtaatcccagcattttgagaggctgaagcgggaggattgcttgaggccaggagttggggactagcctgggcaacaaagtgggacccctggctctacaaaaaaattttaaaaattagccgggcgcggttgtgcgcgcctgtagtcccaagtactccaaaggctgaggcaggaggatcacttgagcacaggaatgtgaggttacttgaactgtgatcgcgccactgcattcgtctaggcgacaaagcgagaccctgtctcaaaaaaaaaaaaaaaaaaaagagtcaaggcttagtaatattcctgaattcctgaaggagttaagaaaggaaaaggacaagcgggggtctaaacgagagcacgaaccctcagcgtatgacggctccaggctccgggggaaagtcctttagccatccatcccaaaattaagcacgctgggagctggagtcacagcagtgataaaacgaacaatgattctggttcctactgactgacaggagaggtttaagggtctctcactctccggggagcccctttccttcctggctgcggagggcggagcccgagagaggcacgcatgcgcaatgcaacgtctgccttaggcccggaacttcggtgcctgggcgcagcggtgcacccggacccggaacattctcaggcgaaagtgtctcttgcgtgcgtgggccggaggttagtgtgcggggcccgccgggcggttgaaaagtccgagagaatcaggatggaggccgtggcgacggcgacggcggcgaaggaacccgataagggtgagatcttggtcacgcgcaggcggcgggtgggtgcggttgcggtgtctctaggaaatgattcccccaggaacgcgaagtaggactcgttttagggggacacccacccccctcagctttaccggtcctcttcactactttgcccagattattccctcccttgtcgcgggctgaccttcttttcctccattccttccccccgaaattaacctcttcccagttccagaccaatcctttccatgtccctaattcatttccttaccaggctaactctcaaattaacagaaacctctctaccccggcctaattcctgcattgcctcagaccagcccttctcaaattacctccttccctgtaccaagctgagccttcccttgctctctagacgaatcctcctacctttccaggctaaacttctacctgcctcatgcaaacttatcccaatctaacgattccttcatttcattgtaactcccgtttcccccaaagtccgaaatccagccaggctcctttcaaagtccttactcaatttctgtgctttcccacaaccttcaaagtaatccgacgtcgggtgaggtgtgattggaagcgtggctccaacaccactggccaagaattggtaattgtggaagccagatggagatgattggtatatggaggtagggggagaattgtcgttgtactttctacttttgtgtatgtttgaaattttctaaaaataaaaaatttaacctaaaaaaagtcttaaggccgggtgcagtggctcccgcttgtaatcccaacactttgggaggccaaggcaggagagttgcttgagcccaagagtttgagaccagcctgggcaagagagagaaacctgatctctataaacatttaaaaattagccaggcctggtggctagggagtagctaggacaagctactcaggagactaaggtgggagtgtcactcgaatcctttgagattgcagtgacctaagattattacaccactgcactccagcctctgcagcagagtgagacttgagcccaggagtttgagaccagcactggcaacatagccagaccccatctctacaaaaaatttaaaaattaaggccgggcccggtggcttacacctgtaatcgcagcactttggaaggcggaggcaggaagatcacctcaggtcaggagttggagaccagcctagccaacatagcgaaaccccatctctactaaaaatacaaatattagccaggcgtcgtggtatgtgcctgtaatcccagctactcgggaggctgaggcaccaactggaatcacttgaacccgggaggcggaggttgcagtgagcagagatcgcaccactgtactccagtctgggtaacagagcaaaactctgtctcaaaaaaaaaaaaattagccaggtttgatggtgcattcctgtggtcccggctactcaggagtctgaggcgggaggatcacttgagcccaggaggtcaaagctgcagtgagctgtgtttgcactattgcattgcagtctgagcaacagagcaagaccctgtttcaaaaaaaagaaaaaaaatttgtctcttggccccatctgtctccttcagagagtcatgtatacttggtcttcatttcctcgtctcctgctcacgactgtctgacttttctcctaagaaactgctctgattagggtctgcactgacttcccccatgttgttcaattcagtccccccattcaggtttttgtttgtttgtttgttttttgagagagtctcactctgttgcccaggctggagtgcagtggcatgatctcagctcactgcaacctccacctcccaggttcaagtgattcccgtgcctcagcctcccaagtagctgggatcacaggtgcccgccactatgcctgtctaattttgtatatttttagtagagatggggtttcaccatgttggccaggctggcctcgaacttctgacctcaagagatcctcctgcctcagcctcccatagtgctgggattacaggtgtgagccaccacacttggcccattcaggttttttttcttactagactggactagaattaaatgctgttgatccttccatcctttttgcatgttttcctttggcttcagcgacaccacagtgcctgatttcctgcctgtctctcaggctgctccttctcagcctgactttgtttcccaggggtgctgtaacaaagtactacaaactgcatggcttcaaacaacagaactttattctctcatagttctcaaggccagaaggctgaagtcagtgttgctgaactgaaatccaggtgtctgcagggtcgtgcttccccacaggctctgggagaaaacccatttcttgcctcttccagccagtggtggtttctggaattccttggcatgtggctacatcactccaatctctgcttccccttttgacgttgccttctttttttttaagacggagtctcgctctgttgaccaggctggagtacgtgatctcggttcactgcaacctctgcctccggagttcaaacaattctcctacctcagcctcctgagtacctgggactacaggagtgcgccaccacacctggctaattttttgtatttttggtagagcgccatgttggccaagctggtcttgagctcctgacctgaagtgattctctcaccttggcctcccaaagtgctgggattacaggggtgagccattgcaaccggcctctttttttttaagataacagtaatgggctccagggattacgatgtagctatcttttgcacagccagtttttagcttcagaggcatgtcctccccgcatctgtgcagtgctttttcctggaccctcttgtcatccctctcccactcccctgtgccctccccagtccctacctctcatttctcttggctttggttcttgtcttgattctgatgacacccacagctctgtctccagcccaacatttctctcctgaggagtctggaggcccgtgtagcagcagtcggaccattcccctggatgcctcccttacttccagcacgtcagccctgtggctcctccactcagcctcctgacatctttctgattcgctcactcatgatcctgttccttcctccacagcccctgcccttgtccagctcagtcttcagctgcatcagtgatttaaatcctccctgatacacacaacacatgtatgtcacctgtgacttctttcctccccaacccagccacgctgcttaaagttgtctctatattctgttttcacgtatttcctgcttgccgcaggcttgctccctccactcttgggaaacaagtctcaccaaggtttgcccagcgctccgctttcctgttttctttccatttttttgagacagagtcttcactctgtcacccaggctggagtgcaatggctgatctcggctcactgcaacctctgcctcatgggttcaagcgattcttgtgcctctgcttcctgagtagcagggattacaggtgcccaccaccatgcccagctgatttttgtatttttaatagagagagggtttcaccatgttggccaggctggtcttgaatttgtggcctcaagtgatctgcccacctcggcctcccaaagtgctggattacaggcatgagccatggtgcccagccagctttcctgttttctttgcccatattattgttgatcctgactgtctcccacatcagactgggtgctccctgagggcaggagctggactggattcatcctatggatcctcagcattgcctgacttagggcctctcagagatttagtgtttttttttctttttttttttttagagttttgctcttgttgcccagactggagtgcaatggcacgatcttggctcaccgcaacctctgcctcccaggttcaagctattctcctgcctcagcctcccgagtagctgggattacaggcatgtgccacaatggctgattttgtatttttagtagagacggggtttctcccagttggtcaggctggtcttgaaatcccgacctcaggtgatccacctgccacagcctcccaaagtgctgggattacaggcgcaagccaccgcgcccggcctaagatttagagttattaaagagtggttgggtgaacgcatgaatgcatgagagagtgaatgaatgagtaaacaaattagcaaatgtattaacgatttaaagaattgagtggatcaataagtcaggcctcagggcctttgcagtagttgttgcctctgcctggaattctcttttccaagagacctcatggcttaatccctcaccacctgaggtctctaatcaaatgtcacttttttggcaaagccttctctgagccttccatttaaaattgcagccttggccaggcatggtggtttacactgtaatctcagcactttggaagcctgaggcaggaggatcacttgaggccaggagttcaagaccagcctgggcaacacagcaagaccctgtctctaccaaaaaaaattaaaattaggccgggtccagtggtgcacgcctgtaattccagcactttggaagatcgaggtgggaggattgcctgagctcaagagattgagaccaccctgggcaacctagtgagaccttgtctttactgaaactttttttttttttttttaatttaaagattggcagggtgcaggccaggcgcagtggctcacgcctgtaatcccagcactttgggaggccgaggcgggtggatcacgaggtcaggagttcgagaccagcacagccaagatggtgaaaccctgtctgtactaaaaatacaaaaattagccgggcatggtggcaggtacctgtaatcccagctgctcgggaggctgaggcagagaattgcttgaacctgaggcggaggttgcagtgaatcaagattgctccactgcactccagcctgggcgaaagagcgagactccgtctcaaaaaaaaaaaaaaaaaaaaaaagattggcagggtgcagtggcacacacctgtaatcccagcactttgggaggccgaaggggagtggatcacctgaggtcaggagttggagaccagcctagccaacatagcgaaaccctgtctctactaaaaatacaaaaattaaccaggcatttggcttgtacctgtaatcccagctagttgggaggctgaggcaccaaccacaataacttgaacccaggaggcggcagttgcagtgggcagatctcacgccattgcactccagcctgggcaacaagagcaaaactccatctcaaaaaaaaaaaagaaaaaaaaatttaaagattaactgagtatggttgtgcatgcctgtagtcctggctgctcaggaggctgaggtgggaggattgcttgagcccaggagttcagggttacagtgaaccatggttgtgccattgcactccagcctggcaatggagcaaggccttatctcttaaaaaataaaaataaaaataggccagtcacagtggcttacacctttaatgcccagcactttgggaggccaaggcaggaggattgctggagccctggagttcgagaccagcctgagtaacatgtcaataccctgtctctacaaaaaatttaaaaattacacaggcatggtggtatatgcctgtggtcctagctacacgggaggctgagatgggaggatcgctcaagcccaggcggtcaaggctgcagtgagctgtgattgcgccctgcactccagcctgggtgaccgagcaagaccctgtctcgaaaataaaataaaattgcagcctcctccacctcttccctcctccttccctgtttatttttccgcataactccaggaaacacctaacacattatgttttcggtaattatgttgctaattgtttgtgtcccctactgaaatgtcaacttttgctcactgtggtttctctagtgcccagaacagtgcccagaatatagtcagtgcccagtaaatgtgagctgagtgagtgactaagcccccagtcccttcccacactcccatctctgaactaaccaatctctcctttcctcaggctgcatagagcctggacctgggcactggggtgagctgagccggacaccagtcccatctaaaccccaggacaaagtggaagcagctgaggcaacaccagtggccctggacagtgacacctccggggctgaaaatgcagcagtgagtgctatgctgcacgctgtagccgccagccgcctgcctgtttgcagccagcagcagggtgaacccgacttgacagagcatgagaaagtggccatcctggcccagctgtaccacgagaagccactggtgttcctggagcgcttccgcacaggcctccgtgaggagcatctggcctgctttggccacgtgcgtggcgaccaccgtgcagacttctactgtgctgaggtggcccggcagggcactgcccggccccgcaccctgcgtacccgcctgcgtaaccggcgctatgctgccctgcgagagctgatccaaggtgtgggggccagatgggcgacagtgggcacatatggggagggaggggagactgaggcagagggaattagagaaaagaatacaagagcagagacagagatcctgggagagaagttctgagacagagacagggacacaggaagagactgagacagaaatgtaaagtaagggggagagatagacaggggtccagggaagagaatgggacagacaatgagaatagatcagaatttagtagatgttagaagtggcatttcagattggtaggctgaggacacagtacacagtgctgtgataattggtcatacctaaggaacaaaacatgagatccctacctcataccatatacagaggcatcaggggaaaccaaaaggagtatgtacatgaccttggggacacagaagccttctgaacaagacacacggtgaaaaccatgaaggaaaaaaaagatagctttttgaccatgacataattaaaagcatccttgtgaccacaacaccagaaccaaagttaaaagatgagagtgaatgaagcagagtgagttaagttgccgttagggagaaggcacaagttatagagaggttcacagagaaagagagagaggctgggcatgatggcttatgcctgtaatcccagcactttgggaggtcaaggtgggtagattacttgagctcatgagttcaagaccagcctgggcaacatggcgaaatgctgtctctacaaaaaatacaaaaattagctgggtgtggtggcgccctagctactcagaaggctgaggtgggagaattgcttgagcctgggaggtggaagttgtgtgagctgagatcccaccactaagctctagcctgggcgataaagccagatcttgtctcaaaaaaaaaaaaaaaaaacacagatgtggaaatgaggatgaaaacagaaggaagatgggccgggcacagtcactcaagccggtgatcccagcactttgggagggcgaggtgggggtggacctgaggtcaggagttccagagcagcctggccaacatggtgaaaccccatctctactaaaaatacaaaaaaattagccacatgtggtggcaggcaactgtaatctcagttacttgggaggctgagggaggagaattacatgaatctgggaggtggaggttgccaaaaaaaaaaaaaaaagaagaaagatgaatgaggtgggggtaggtgacagaaactgaaaaaagcaggaaagatagaaagatggagataaaggaagagatggagagagatccagagccggggtgggtgataatccaagttggggagaaggagggatagaaactgaatctgctagaggctgggcacagtggctcagacctgtaatcccagcactttgggaggccgaggcaggcaaatcacttgagataaggagttcaagaccagcctggccaacatggtgaaaccccggctctactaaaaatacaaaaaaaattagccaggcactgtggcaggtgcctataatcccagctactcaggaggctgaggcaggagaatcacttgaacccgggaggcggaggttgcagttagagttaatcgagatcacaccactacactccagcctgggcaacagagcgagactccatctcaaaaaactgagtctgctagaggatgccacaaacagctgggggtaagattgctggcaggagtggggaagctgagcaggacagggacagtcacagcctatggtgctgcagaggccaggagtccgagcagtttctttgccctggactctgaagacacggctaggaccagtggaggggagggaccagggcaggtttaactgttatttgagggacagagtcactcgtgcagaaacaggcagccaggggtgatgcagggaactcaagttttggggtagtggggaagccaggcccacctgaggggttgctgcatagaggagcactcgagagaggatggatctagggccttccaccaccaggaggctttcccagggatacacgggcagatgccccacctgacctgatcccttgcacacacatgccaaatccacgtggatgtacacacatacacgccccacagtgaaggcgtgtccactgccagccagactagggccccacaaacaggcacacaacctagagacacacaacttctgctgcattgtcctgcatgctgacacccagacagacaggtgtctgtgggcatatgctgggcctcacaggacatgtgtgtgtacataggccatgtacacgtccatgggcaggagcttgtgcatcgtgcctggacacagttgtacacgagctccagaccgtcagagcctcagaggccaggatgtagccaggtctgcccatgcacacacatgcttggatgcatgaatacatgaatacacaggaagatagaggccgggccacatacacacactcaggtgcctgcacgagtaatcacatgcacatgacctcaggtgcctgcatgagtgcttgcgcacacagcttcaggcacctgcatgagtattcacgtgcatgcctcaggcgcctgcattattcacacgcacgcctcaggcgcctgcatgagtactcacgcgcacctcaggtgcctgcatgttttcctgtgtttttgaatgtgtgcatacacacacttggactgtgtatgcacatcatcccacaagcatgatcacacacatacccacatggacactatctgctcagtcgctcaccccatgcccaccctgtctctcctctgtgcagggggcgagtacttcagtgatgagcagatgcggttccgggcccccctgctatatgagcagtacatcgggcagtatctcacccaggaggagctcagtgcccgcaccccaacccaccagccccccaagcccgggtcccccgggagacctgcttgcccgctctccaacttgctgctccagtcctacgaggagcgggagctacagcagcgtctgctccaacagcaggaggaggaggaggcctgcttggaggaagaggaagaggaggaggacagtgacgaggaaggtgagggccagtagcaggaagaccccagattccagacaccccagccctaggcctgtctgtctccacttcatggcagcaggctgggcccccaacctgcaaaagccgacattgcgtccctcccctgcccagcctgactctctgtgtatgcccttccaaccgctgcagcatccccatcccccactctgaggcaccaaatgaaccctcgcctccaggtctggacaggctgttccctccgccaggaatgcctctcctcccacccttcaggtctcagatcctgacccgaggatacagtctccagagcactatatggtcatgtgttttatgcgtgtccctggagggcagggaccagggccatctctgtcactagtgtgttcccagagccacccagcgcaaggctgggcacaggagcagcagctctctgtggactctgtgctcagtgcctgcccgagtgcacccgcattcacaccccctctcctctccctctgcagaccagaggtcaggcaaggactcggaggcctgggttcccgactcggaggagaggctgatcctgcgagaggagttcaccagccgcatgcaccagcgcttcctagatggcaaggacggggactttgactacaggtgctcctgtgcctccacctccccatcccccagcccagcatcccacggcctttggtcacatgcagagcccttaacaagctgtgggggtctccctttgtggagctacaaggccccaaaacagttccaggatgtggggttgaacagccaaaggaagaggctgggtgacctcggactagccttgtccatctcagaccctcagtctcctcacctctaaggcaggggatggacagggatgacatatagctcagtatcaatgaaaccctgaaacacttccctcctggcaatggcagaggctactaccccaagccccccaagtctccctaggaagcccaacctcttccgcttcaccttggacctcctcatgctgcaggaagtaacccctggcaaagttcatgcccggcatggaggggcctgcactggctgcccccacagttacagttgttcatttctccagtagcaccccagggctgagacacgtgggccacctgctttggaaaaggacccaggagagtgatgtgtcagtcaaagattggttttgtcatttaaggtagctttgccttgtggtcccaaacactgggcccagcagcagaggaccctccttggtttcacatccagccccgatgacatgtgaaatgtgtgaccacacataagcggaccctacgtccgtcctgaggtgggctcatcaggaaagtgggaattgtgattgcccctgccgtggggcccagccatggtcaccagagcctcctcccattctgggatccctggctcttgaatggaatctggctgctccacttccagccaggcaggcctgctcagagccccagttcctgcacgcaaagtggtgagcagagggcctggaccatggggaccctcattcagcaggcatcactgctgttcccaagccagggcccaggaggaaattgggggtggcagggaccacagtgtgttgcctcgggagggcagcagtggccccgacgtgtcccccatccgtgcattcagttggcatgtgctgagcatctgtgatgtccacaggctctggggataaggcggggaccaaaaccaacgaaaggcttccctgcctgaaaaggggtcccactctagtgaggaagatctagaattttctagcacttcatggtgatggggccatgaggaaaagtgaagcagtgggaggggagtgacagggtggctagggaaggcctctctgaggggctgacagcaaaggcctgcaggaagtgggaggagcattcctggcagaggccatagtaggtgccagagcccccagcagcaccaaggggcagaaggggctggagcagtcgcaaggggtcgcaagggggtaggagatctctgagtggccaaatcaagctaggcttggcaacccaagtgcgtgctgctgggtttacttgctgccttagggcatgggcagctgtcctgcctgtggtcagctctggctaatcccggcctctatccactggagggcagtagcaagcccccagtgatgacgtcaaaatgtcaaaatgccgtgggggcaaaattacccccaagtggttctttgttgagagccactgcctgcttgagaatgtaagcccatgtgtcgccacattttacagctttttaagaaaaactagagctttggggttttttttagacagggtctcctttgtcacccaggctggaatgtggtggtttgatcatagctcaccgcagccttgacctcctggcctgaagtgagcctcccgcctcagccaactgagtaagctgggactacaggtgctcaccaccacgcctggctactttttcaatttttttgtagagacagggtctccctttgttgcccagggctccaactgctgggctcaagccatcttcctgccttggcctcccatagtgctgggattgcaggcatgagccaccatgcccagcccagagtttttgtgcaaactctgatttggaaaatgttcccttgagttttaaaccctgagagttttaaacactatctcccttgggagggtcagctctgacggctgccagcacatggcctttgacatcagggtgccccaggcctttgacctgggcatccgagggtcccagggagacccagtccttgacagcctcctcctcctgcagcacagtagacgacaaccccgacttcgacaacctcgacatcgtggcacgggatgaggaggagaggtactttgatgaggaagaacctgaggatgcgcccagcccagagctggatggggactgatggccgccacccttcccaccgcctgccccatccccatccccaacaaggcagctgattccaggcctgctcagtgaccctttctctagggggacatcagggcagtgccccacaacccacacacaccaccatctcactgggtctagtctcatctcagacaacccccacccccactgtttctggggttccctttctcatctctcccaccctgtctcctgcctctgtctttcttggtgtctgtctgggcttctttctgtctctttctgtctttctgtctctctccctacccccgctccctctttccagtgctctggctggctgtctctccctttctccccctctctctctgccttaggctctgtctccaccgcagggcccaaggtgaaagtcctccccttgccggaggccagctggcagggcctttcgtggctggaagtggccagtttggttccggtgctgacccctaggccccagcgcagctgcctcccgtgctgtctgtctccccctctctgtttatgtctgcgctgtgtctcacactcagagcctccttgcttctgttaggttcccatctctccttctgcctcactctgggcctcttctttctacttgtacatttccacctctctaggcctctgctctcactgtccctctctgtctgtctctcagcctttatctctgggttttgatcccccactccaggctctgggccccttcttcccccttccctcaaacctggctgctataggcagcagaaccctgaccactgagtaatacagccccaggggagggaggagaccccaggcagggaggatgggggcagctctcttctctccccaggacccaggctgtggatcacggggcctgccagcttgagtgtagagggaggggggactctacccttctcagccccaccagcccccctctgcccaaccacaattttcccttcctccgccttcctctccctctcctgtttacactccccaaatgcgcacaggctgttatcatgggtcctgagtcatcccacacacagcctgccccagcgtccctgcccccagctggccgcagggcccgccccatggagccccctgccgccctgggctaatgggagccagatggccgcctggtgactcagccaccgggcctgtgggaacccaggcgtcccgccttcccatgcccccacacccggctcctgctcccccagcagacacacacaggagggcctggccactgttgagggggcacacagggcaagggtcaccaagtcggggcctagggactcctcatgcctctgagatggaatggtggtatcctgccgtggccaagcctgaaggaccctcaaaactgcctcctggagtccacggttcctgacctccgagcctcagctatgccctctgggtcaaccagaattagagccagacagggaaagtgagagctggatggaggcagacaagatgctcagagcgactattaaagaacgaaagcctctgctacggagcgcttctgtcctctgtcaggcccgagcgaagtgcctgacaccgggttggatcctcagatggccccatgaactagtgaagtgggtcaaaggaggcctggaaagatgttgcttcctcaaggccactcggccatcagaggcagaaatgaaacaggaacccaggcctagaatcacaaaggtcctagaaaccacttggctgtctggcctctcaggtgtcagggccatccagagtgagacagcattggagggacaagtgtgcatgcagatgtcctcagacgggaaggtttgagaagggtcagatggtaggcgggcctaacaagggctccgtgctagccactgtcccgcacacagacaggatcaggtcatcttgatatggagatcagtccccaaatcactgaattgtcccagcagtgctatgccctaggtactaccaatatcactcctctatttcccagaggaggaagcagcagctagactccaggaccttggggtcatatctctcagaaagccaagagtgcaggatgagagctgtctgtctcttacctgcctgtatttgtgccccatttttaaagagcagagggcctgggccacaggaaaggtatcagcccttggtgataggcacattttttaccagtctatcatttggtcattaaatttgtttacaatatactttgctatacgtaaatttgttgtgtaggtttttaaaaagcgatgagagacacagaaattgagtcagaattagggttagtcagatggtcaagacgtgagcatctagctgacagacagaggtggagccagtcccagggacagggattagatggggagacaggaagagaggtggagacagagtggggtagggatgacgggagacacaccccctggtcactgcctctgagacctgggggtggtgggccccagggcgggtgcctcccatccccctcccagttctcccggggtcggggtaggtggaaaggctgagtcagggagggcgggccccgctgggagacaacccctaggtgggcatccggcccccacccccgtgtctcctgtccgtcctggccctggcctggctcgctggcctggccgccaccccgccccccacgtctgacacctccatgcgtcctgccaaagcaagctgcctccctgcactcttccccctccagctccagtcactctgtccctctgtcccccgtcccttctccctgcttctgtgcgtttctttccagccctctgccttcctccctcaccgccactgctctgtcttctcgttctgtctccacacctctggctgtcggtgtctccccgtgactttccgtctcccctctctctcctcccttgtttttcccatgcctctccctccctccctccctccctctcctccccaccttttccactccgtgtccccagccattctccatctctgttctcagctcctgtcacctcgtttccccatccctttctctgctggagtctccctctggggggctctgtcctctcctcactttgccctttccctctcgctgctgtgtgtcttggcccgccccccgtgccccccatctcctctgtctcccacactctgggaagcccggctgggatatccaggttggagcctcactggcggccactggaaacccagaatgaggggtcatcgcctctcgcccacccagaaagggcgcaggagggggcagcaaggttgcggggcctgtctggccagaaggaaatgtctgtgctgtggcctggtcacccccgcccccaggacctgctgggctgctgccgcccccggccggggctgaggccgagtaaacacagcaaacacagccgccggcagcctgggatatttataccgaggctgggcgtgggtccagtgcccaccacagcccctgccctgccctgccttgcctgctgccacagccagctccgagccagcgtggcaccagccggcaaggggacgcgccgcagacacagcctgcgctgggtatggaggccaacaggcactggccgctcatgatgcaggcggctccatggacgcaccctgtccccctcccctgaaaacaccagcacacaatgtggacccacactcgcagctgctcacaaacacacatccacccctgctgagaacgcgaaatcccctcaacgatgatgcaaaacagacccacacaactccacacactgcagtcaccagcctacatgtgggaacacagcatgcagacaccaccttagcacctgctcacagcacccacaggctgggaacaccagtccctgagatggacacacagccccgaagtacagccctccctcacacagacaaacactgagaaccacaggaagcatgctggatgcacaccacgtagacaaacatgctcagaataccagcgacacatgcactgatcacagtgcaacccagaaacaactcaactcatctgcctcatatgtaagaaacacacacggccgggcgcggtggctcatgcctgtgtctcagcactttgggagaccaaggtgggtggattacaaggtcaggagttcgagaccagcctggccaacatggtgaaatcccatctctactaaaaatacaaaaattagacgggtgtggtggtgggtgcctgtaatcccatctactcgggaggctgaggcaggagaatcgcttgagcctgggaggcggagcttgcagtgagacaagatcgcgccattgcactccagcccaggcgacagagcaagaccccgtcttacacatatacacacacactcactcccctctcctggagaaacaccattcccacagatgattaacatatgcagaaaacaccacatttcaagtcaaacttacacttaaaaatgcacaaatttacactcagaagaacagtgaagatgttgagaaaaatatcagacacacaatatgccccagatacatggccgacttgcagaatcaaacagtgccagagcataaaacccacagaaaatacaacagcttgcccagcagaaatacaaaatgcagacgcacaccccagaaatgcagcgcagccacaaacacacggagctaacacgtgctggggacacacatagacaagaccatccataccaaacagcacacaggcccccagaacacccatgccagacgcagctcacgccacaaagcttggaatcacgcacacaataagttcctgaacacacaaatccgaatccacactggaacctcaaatactctgcatgtccagagactaagggggaaggggctttctctcacccaccaatctccccactcccccttgctgacccgggtcccaggcccgtcttgggggcgggggagggggcaggaaggcctgagctggcctcccccagcagcttcctgccccacgggggctggacaggaagctggggctccagccggaacccaggctccccccacgacttccctctgtggccccgggccgcctgcagaggcaggggcggggcagggggaggaagcggggagccccaaaccccctgccctgcccctgcggtcggccacaggcgggggcagacttgtcccgacggggctgagccacccatcgggcctgggtgccagggtggcagggcaggggcagtgcgcacgcggccagaggaaggtgctgagcccacagtttcccctccccgccctgtggggctgtgccagctcagccggcagccctgggcaggtgggcggggtgtgtcatgagggcgtgttgggcaggccgaccacaccgcgaatgtgcagccagcacttgtcctcaggccgaggcacgagctggggctgggcatgtgagggccgcgtctgccaccctgggggtgtgtctgctccgtctgggaccctgggtgtgacagtgtgtctgggcgtgacgtgacggggtcgctgcaatctgtggggccctgtgggactccccaggctggaattgtgcgtgtgtggcggagggtgtgggatgtcagactgagtgggtaagaccgacctgctgtctgtgaggttgtgacgtgtcagacctctgtgtggggtgtgtctggtgggactgtgacaggtccgactgtggacatgcaccctggacctgtttgtgactgtgaacccatggaggaggaggtggctgttgagggatccatttcctgtccgggctctgatgccgtgatgcgtgtgcgtgcatgacactgtttgaatcagtgtctggtgtgcggtggttgcgaccatgaccctgtggaatatatttgtatatgactgtgttgtgccaggtccctattgaagtctctgctcgtgttgtgtcccagtgaggctccgaggctgggtggtgtttacgtgatgggctgacactttctctatttgtatctgtgtatatgtgggctgcagctgctgccaaatgacacagcccatgtgttacgggccctgcaggaatctctgtgtgtccacggcggctctgagaggtgaatatttgtgtagtgtggggcaccgtccgtgtttcccgccgtgtgagtgtgtctgcatgtgtacacgcaccacatcctcatagggctgcagcgattacagccgagtcactgtgtcctagcttgtgactctgcctcttggggccagacctcagcatctctatacctatccatttgttggcatgtccttgcatagtgaactcctgcctccccactcctccctcagccctgtgtgctttgggacctgaggccagaggagtaaccacatttctacccctatgctgagctgggagggccccaggtccctggcacccagacccagtgctgccaacagctctcatgcccacaggcaaaggaaccgcagcactcatactgtccttcctcccaggacaatcactgggtgtggggaagtgaaacctaggagaaagagcagaaactgagaggcaggagaaagaggaagcaggagagaattcacaagcaggaccatagcagatgggaagaaatggagacagcagagggagacccacctgtggctgctgccatttcttgcctggacagctggtctgtctgtgctcaccctcaccctgacacttctgtccactcccaaccatgagcaagacggcggaccctctgagcgcctaggtcaaaccctgccatggctcctgtcttccttgagtgcaagttctttttttttttttttttgagatggagtctcactctgttgcccaggctggagtgcagtggtgcgactttagctcactgcaacctctgcctcccctgttcatgcgattctcctgcctcaggcccctgagtagctgggatacaggtgtgcaccacaatgccagactaatttttttttgtattttttatttttatttatttatttgagatggagtctcactctgtctcccaggctggagtgaagtggcgtgatctcggctcactgcaacctccacctcccaggttcaagcgattctcctgcctcagcctcctgagtagctgagattacaggcgtgcgccaccatggctaatttttgtatttttagtagagactgggtttcaccatgttggtcaggctggtctcaaactcctgacctcgtgatctgcccgccttggcctcccaaagtgctgggattacaggcgtgagccactgcgcccagcctttttttgtattttagtagagacagggtttcaccatgtggtccaggctggtctcaaactcctgacctcaagtgatccccctgcctcagcctcccaaagtgctgggattgcaggtgtgagccaccgtgcccagtctttttttttttttttttttaaagatgcagtcttggctgggtgcgctggctcatgcttgtaatctcagcattttgggaggccgaggcgggcggatcacctcaggtcagaagttcgagaccagcctgaacaacatggtgaaacttcgtctctactaaaaaaaaatacaaaattagccgagcatggtggcgcatgcctgtaatcccagctacccagctacttgggaggctgaggcaggagaatcgcttaaacccgggaggcagaggttgtggtgagccaagatctcgacattgcactccagcctgggcaacaagagtgaaaatccgtctcaaaaaaaaaacataaaaaaaagatggagtcttgctttgtcacccaggctggcatacagtggcacagtcagggctcactgcagccttgacctcccaggatcaagtgatcctcccaccttagcctccagagtagctgggaccacaggtgtacattttttaaaagtgttttgtagagatagggtctcactatgttacccaggctggtctcaaatgcctggattcaagtaatcctcccatctctgcctcccaaaagtgctaggattacaggcgtgagccaccccgcctggcctgaactactatcttttattgtcttcttcactatcccccactaaagcaggttcctggtgggcaggaactcctcccttaacctctctgggcttgtttcctcacctttaaaatgggtgttatcagagtccctgcatctcagagtgttgctatggtgactgaatgagttcattaatgtaaggcacttcaacagtgcccaaggtgctcaataaatagatctaactacagtagtgttccccactggtcccctgtgccttgatgccgggcaaaggaatagtgcagacaggcaggaggaggcagagagggagagagagggagtgggagtgggggaacgtcagggatggagaccccaggcaggcgcccaatgacacagagatccgcagtcctctctccatctttaatggggccccaggtgggcttggggcacgggtgtccttaaatacagcccccatgggcaaggcagcgggggcggggcggggtggggccgggcctgccggggcggggcggggcggggcgggacctcagctgcacttgcaggagcgcacgatcatgttggacagctgctccaccttgggcttgcggcccacgtagtacacgatgggcagcggctccagcgcctgcggcacgcagcacggcgccgccgaggcgcccgggttatgctggttgtacagggccaggacctgcgggcggcgggcggggtcagggctcagggctcgtggagggaggaaaacggccctccactgccccatcccccacccgctaccgcgccagcctctctcacttcgtctctccccgcatcccctcttcccatctccaattcggtctctcttatcttctaacatcctatcttattctgtctctccccacctgtctgattttctttttgttttgagactgggtctcgctctgccacccaggctggagtatagtggcacgatcatggctcgctgcagcctcaacctcctgagcgcaagccatcctcccgcctcagcctccggagtagctccaaccacaggcaagcgccaccactcctagctttttttttttttttttttttttttttggtagagatgggatctcagtctgctgcctgggctactctcgaactcctgggctcaagcgatcctcctgcttcagcgtcccaaagtgttggtattaccatcgtgagccgccgcgcccgcctgattttctttctcagtctctgtccctcctcatcttcgcctcttgccttgttgtgtatctgtctttgtctctccttggcctaactctgtgtctgtatctgtctctctcattttgtctctccatttctgcgtttttccttccatctccctgtctctcttctccccttcacccccatccctctgttacttcactctgtgggtcttcatagctcatctccctctggcccctgctcagagcccctctctagcttcctgcctctctccccatctctttattcattcccctccccaccccatccctctctttctccccatcctgccaactcacctctctgactttacttctctttctctctcctcttcctccgtcctggctccccccaagcgcatctcgtagcccggtgggccagacgtaccttgctgtactgcgtgtccaggctccaaatgtaggggcagggcccgaggcagaagttggcatggtagcccttgggctcgtggatccacttccagccgaggtccttgcggaagtcaatgtacagctgccgcacgcagcagttcttctccgtggagctgcaggcaggagagacgcgtcaggggcagggaggggctaccaccatagaagccacatgcccctcctccccaggtgcgtgtgtcaccctaggttgcccccccagccctatctccatctgggtctcccttgcacccactgtgttaataacaacacaaatagtcatgataatcactaacacagattaagcacttcctccagtgctaagagcaatgtaataattaatttcacgcaatgcttaagacaagcctgtaagaagccagatgaccatccacgggggggctaaataaatcatggcatgccacaccctggaacatacaaaataacacagctccatgtaaactgatctgctctatttgtgcaacaaatgtttattgaactactactgtgtgctgggctgggatctactgtggactgaggacaaatgaaacagatagaaataggctaggcatggtggctcacacctttaatcccagcactttgggaggatgaagtgggaggatcgctggagtcgaggagttcgaggttgcagtgaactatgataacaccactgcatgccagcctggacaacaaagtgcaagaccctgtctctacaaaattttttttcaatttttttaaaaaagagacagaaatctctgccctccatgggcatgctataaattgtcttgtcactcctctgctctgaacctggctccatctcacggcaaatgcccaagtcctcaccgtgagccacaaggtgctatcaaatctggctgatctcaactccctctctcacgcctactccactccagccacactggcgtcctgtctgttcctcagacagtcttatttcggggctcctgcatctgctgttccctctgcctgccttgctagtcccacagatacccactccagcttgttccttcacttcatttcttctttttttttctatttttttttttttttttttttgagacagagtctcactctgtctgccaggctggagtgcagtggcatgatctcggctcactgcaacctccgcctcccaggttcaagcgattctcctgcctcagccttccgagtagctgggattacaggcgtgtgccaccatgcccggctaatttttttgtctttttagtagagacagggtttcaccatgttggccaggctggtctcgaactcctgaccttgtgatccgcccacctcagcctcccaaagtgctggtattacagacctgagccactgcatctggcctatttattctttttaatttgttattctttttagagacacggtctcactatgttgctgaggctggtgtcgaacttgggctcaaacgatccgcacgcctcggcctcccaaagcattgggattactggcatgagccaccacacctggccccttcacttcatttaaaccttagctcaaatgtccttcactcagggacccttaactcctaaagcagtgtctggaatgcagtaggtactagtaaatatcagttacatgactgaacatcacctcctcagagatacctttctgagccatcctttccaaaatatccaagtgactgttagttccatttagtgcaatacggtattgcagttatgcaagaaaatataaaaatgtctgcatttgaaatggggcaaaatcttaattaccgatgacgctggatgagagtttacgggcattcattatcttcattgcttttgtatacatttgaaattttccataataaaggaatttaaatcagaataggaaaaataacagttcccaatatctattactctctgcctgccttcttctggtttattttacttcttagaactgtcaaagaggccgggtgcagtggctcacgcctgtaatcccagcactttgggaggccaaggcgggtggatcacctgagatcaggagattgagaccagcctgaccaacatggcgaaaccccgtctctactaaaaatacaaaaattagctgggtgtggcggtgcttgtctgtaatcccagctactcaggaggctgaggcacaagaatctgcttgaacccaagaagcagaggttgcagtgagccaagatcgtgccactgcactccacccagggcaacagggtgagactctgtcttgaaaagaaaagaaaaaagaaagaaaagaaaagaaaaagttgacaatgccttttttttttttttttttttttgagacagagtcttgctccgtcacccaggctggagtgcagtggtgcaatcttggctcactgcaacctctgctcatagattggtggggccagccaggcacggtggctcacgcctgtcatcccggcactttgggaggctagggcaggcagacttgaggaccctgtctttactaaaaattcaaaaattagctggacctggtggcgggcacctgtaatcccagctactggggagtctgaggcaggagaatcgcttgaacccaacttcaagtggcaccggataacctagaggcaagataaagcctttccaagagccacagaagcctgagaaggaagtcaagaaactgagatccctgtgaactcagcccgtaccacccaatttggttggacctcagtttcctcatctgttcagaggtaggagctactagataaaataaggtgttaagctgagggccaaggggccatcatgggcaggcttagggagggccatgagtgcctgagatcatatgcacatgtgtgtatgtatgcatgtatttctgggaaaaagagtcctggctttcactttctcacaggaagttctgaactcacaaaaggggaagaactagtgtccggaatctttttttttttttgagatggagtttccctcctgttgcccaggctggagtgcgatggtgtgatctcagctcactgcaacctccgtctcccgggttcaagcaattctcctgcctcagcctctcaagtacctgggattacaggcatgtgccaccatgcctggctaattttttgtatttttagtagaggctgggtttcaccatgttggtcaggctggtctcaaactcctgacctcaggtgacccacccacctcggcctcccaaagtgctgggattacaggcatgagccaccgcacccggctcagaatcatctttaatatgcagttcaaccctagctggggttctgagatcctaggatttgaacaatctgtgatactgttatccaagtcagcagctctccacgtgagctcccaggaccagcggcagcatcacctgggaactatgggaaatgcagattctcaggtggcaccccaggccactgaaatcagaaattgtgtgcaggactgggaacaacagtccgtgttgaacaagccgtctaggtgatcctctgactcattttttcagcacacattcggggcctaccctgcaccgggccttgggatacccacagcccttgcccttgccaagcctcttccgtccagtctctcaagacctaggccaggtgcagtgactcacgcctgtaatctcagcactttgggaagccaagaccggtgaatcgcttgagcccaaggagtttaagaccagcctggggagcatagtgagaccctgtcgctacaaaactttttataaataaaagacccaacagagactgtttgttgagtcaaagatctacttagggccccaggggagcccagaggcctcacatccatcttggatgttggagaaaggggttaggaaggaggtagtgttcgagctgccttaagaacaaattttcctatgaaagttttttttttttttttttgagatggagtcttgctctgttgccccaggctggagtgcagtggtgcaatcttggctcactgcaacctccatgtcccaagttcaagcaattctcctggctcagcctcccaagtagctgggattacaggcacacaccaccatacccagctaatttttctgtatttttagtagagacagggtttcaccatgttggacaggctggtctcgaactcctgacctcatgtgatccacccgcctcagccttccaaagtgctgggattacaggtgtgagccaccgcgtccagctggaaagtttcagatgtacacaaaagcagcttcaacaatgaccaactcatggccaatttccattgcatctctacccctatccactatctcttttttttttttttttgagacaggatctcactctgtcacccaggctggagtgcagtggtgcaatcacagctcactgtggcctccagctcctggggctcaagccaacctcccacctcagcctcctgagtagctgggacaaaaggtacacaccaccaggcccagctacttttcatatttttttttttgggagatggggtttcaccatattgcccaggctggtctccaactcttaggctcaagcaatcctcctgccttggcctcccaaagtggtgggattatagctgtgagccactgcagccagccgacaatggtttatctcaaagcacatgcaatccaccgtgttgcttcatccataaatatttcaaatgtatctctaattaagactactttaaaacacagtcacaataccatgtaagaaaattaacaattccttgatatctagaggaatatctagacagagttcacatttacccaactgtctcataaatatcttttttttttaagcctgtgtaaataaggattcaagtaaggtctacacattgcaattggttgatatgtctcttaggatttttttttttttttaatttttgagatggagtctcactctgtcacccaggatgcagtgaagtggtgcaatctcgggtcactgcaacctgtgcctcccaggttcaagtgattctcctgcctcagtctcccaagtagctaagactacaggcgcctgccaccataccctgctaatttttgtatttttaattatttatttatttttttgagacgggagtctcactcttgttgcccaggctggagtgcaatggcgcgacctcggctcactgcaacctccacttcctgggttcaagcagttctcctgcctcagcctcaagagtagctgggattacagggcccgccaccacgcctggctcatttttgaatttttagtagagaggaggtttcaccacgttggccagactggtctcgaactcctgacctcaggtggtccacccaccttggcctcccaaagtgctgggattacaggtgtgagccacgacagctggcctgatttttgtatttttagtacagacagggtttcaccatgttggccaggctggtctccaactcctgacctcaagtgatccacctgcctcagcctcccaaagtgctgggattacgggtgtgagctaccatacctggcctctcttaggacttttttcaaaatctacaaaatcatctctctctctctctgtatatatattcagggtcaactatatatagactgacccttggacatgggtttgaactacatgggtcctcttacaaaattcaccacttacaggtgaatttttcttccacctctgccctgagacagcaagaccaacaccttttcttcctcctcctcagcctactcaacatgaagacctttatgataagccacttccactcaatgaatggaaaatatacttcctcttccttatgattttcttaaggacattttcttttctctatcttatttttaaaatgcaggcataggccgggagcagtggttcaagcctgtaaggccagcactttgggaggccgaggctgatggatcacctgaggtcaggagttcaagaccagcctggccaacatggtgaaaccccgtctctactaaaaatacaaaaattacccgggtgcgatggcggatgcctgaaatcacagctatttgggagactgaggcaggagaattgcttgaacctgggaggcggaggttgcagtgagctgagatcacttcactgcactccagcctgggtgacacagctagactctgtctcaaaaaaaaaaacaaagaatacggccgggtgcgtggctcacccctgcaatcccagcactttgggaggctgaggcgggtagatcacttgaggtcaggagttcaagaccagcctggccaacatggtgaaaccccacctctactaaaaatacaaaagttagccgggcatggtggcaggtgcctataatcccaactactcaggaggctgaagcaggagaattgcttgaacccccgggaggtggaggttgccgtgagctgagattgtgccattacactccagcctgagtgacaacagcgaaactccgtctcaaaaaaaaaaaaaggggatataggacataatacataaaacatgcaaaatatgtattattcggccgggagcagtggctcatgcctgtaatcctagcactttgggaggctgaggtgggcggattgcctgacctcaggagttcaagaccagcctgggcaatacggtgaaaccccatctctactaaaatacaaaaaattagctgggcgtggcggtgggcacctgtggtcccagctactcgggaggctgaagcaagagaatcacttgaacccgggaggcagaagctgcagtgagccgagaccgcaccactgcactccagcctgaatgacagagactctgtctccaaaaaaaaaaaaaagtattaatcaactgtttatgttgtggataaagcagaattccagtccacagtaggctattaatagttaagtttttggggagtcaaaacttgtatgtgaatttttggttgcatggggggtacgtgtgtgtgtgtgtgtgctttccccttctttgcattgtatttgatgaagaaactgggtgaggtttcttgcagtctgagttttgctgaccatttcctctgttcctgtctttctagaaaactgttaggatctacagtcctgatcagattcaggtttgatttttttttttttttcctgagacaaggtcctgctctgtcctgaaatgcagtggcgtgatcctggctgactgcagccacaacctcctaggctcaagcactcctgcctcagcctcccaagtagctgggactacaggcacacaccacccagccagctagtttttttgtatttcttgtacagaggcagggttttaacatgttgcacaagctggtcttgaactcctaagctcaagcgatctgcctgccttggcctcccaaagtgctgggattacaggcatgagccaccgcacctggccttcaggtttgattttttgccaagacttcctaggcaacattgggtccctccctacggaggctgacatggctggctatctccctttgtaatgtcaggagctgttggcactcaagacctcaatttgtggccgggcgcagtggttcatgcctgtaatcccagcactttgggaggccgaggcgggtggatcacgaggtcaggagttcgagaccagcctgaccaacatggtgaaacccagtgtctactaaaaaaaccaaaaattagccgggtgtggtggcacacgcctgtaatcccagctactcaggaggctgaggcaggagaatcacttgaacctgggaggcggaggttgcagtgagccgagatcacgccactgcactccagcctgggcaacagagcgagactctgtctcaaaaaagacctcaatttgttcattgacagcgttgctgggctgatggcgctaagatctggtggtgaaggagcctgggagcagggctgattttctggcagggaaacagccggtaacaaagcccagagacaggaccaaaatattttaagcaagggaggaataaggtcagatgatcactctaaatttacaacattctaactctccatttcaactttctaggaatccaacatttcagctttcttagattgcagtattagcattccagcatcttatgattctaacattctgacagcatcttcaactctctaggattccccctttccaacctttgaggatcttggcattcctgaattccagtatgccagtattgcatcccaacattccaaagttctgagccatcactcaagaggttcaaactgacactttctttcttttttttttttttttttttttttagatggagtctcgcatcattgcccaggccggagtgcagtggcgcgatctcggttcactgcaacctccacccccgaggttccagtgattctcctgccccagcctgggtacctggatagccgtaatcccagccgagtagctgggattacaggtgccagccaccacacctggctaatttttgtatttttaatagagatggggtttcaccatgttggccaggctggtcttgaactccagacctcagggatccgcccacctcagcctcccaaagtgctggaattataggcgtgagccaccgcgcccagcctgctgccactttctattaataaaatcccagcattctaatattctaacattccaacactgagttccaacatgctgagataccaatattctgctttctccaactccaacatttgtggatgtgaatatttcaaaacagaattctaccactgtgagcccaatattcaaggactccaatctgccaacactggtatccacaattggccagtggtgcaggaattccacatgggccatcttcccattttgaatccccaaattctaggattccaatgtttcagctttccttgagtccgacattttccatttcagtaattaacaccaaattctagcattctagaatcccagcattctagaacctcaacctgccaacaatttagggattcaagatggtgaccttccaactttgaattccaacaatcacagggttcaactttctaacattctgtgattccaacactccagcaagaaagcaaggctgggcgtggtggctcacacctgtaatcccagcacttcgggaggctgaggcaggcggatcacgaggtcaggagatcaagaccatcctggctaacatggtgaaacccagtctctactaaagatacaaaaaattaggccgggcgcgttggctcacgcctgtaatcccagcactttgggaggctgaggtgggtgtatcacgaggtcaggagatggagaccatcctggctaacacagtgaaaccccatctctactaaaaatacaaaaaaattagctgggcgtggtggcacgtgcctgtagtcctagctactcgggaggctgagacaggagaatcgtgtgaacccgggaggtggagcttgcagtgaatcaagatagcgccactgcactccagcccaggtgacagagcgagactctgtctcaaaaaaaaaaaaaaaaaaaaaaaaaggaacctgatcccaacattacaagactcccagttctttttttgttttttgtggctgggattataggcgcccaccacgcctggctaatttttggatttttagtagagacgggtttcaccatgttggccagacaggtctcaaactcctcacttcaggtgatccacctgcctcagcctcccaaagtgttgggattacaggcgtgagccaccgcacctggcacaagactcctggttcttacacccagacctcatcccctgagccctccaagctaaaggagacagatgctcagcccaagcacagcagcagccaggtgtccaacctggagcacctggtcagcagatggcagtcatgcccccagcctggaaggcctccatccaggctacaaggctcacctgaagcaatagttggtgtccagggctcggcggtgccgggagctttgcagatgctgggccctctccagcggggtggccatgagaagcaggaaaggccggttcatgccatgaatggtggccaggtcacctcggcggccggtagtgaaccctgctttggtgtgggagtcaggggataggggacatacacacacactctcagagggatagataagtggggcgtggggcagatgggaacacacacacgcacacacgtcacaactgggcatggccggggaagcaggcctcaccgttgatgtccacttgcagtgtgttatccctgctgtcacaggagcagtgggcgctaaggcgaaagccctcaatttcccctgtaggagtggcgagagggaagccagtctgagagtgcagctcacccagcccctggaggaagaggaaggaaggagcaaaccccaggggcttccttcctgcctcccccacccaccccactctgccctctcactgcagctctctctttttttttttttttttttttttgagacaaggtctcgcagcctcaatctccaaggcccaagcaatcctcccatctcagcctcccgagtagctgggaccacaggcgcgtgctaccacgcatggctaattttttttttttttttgagatggagtctggctctgttgcccaggctggagttcagtggcgtgatatcagctcactgcaacctccacctcccaggttcaaacgattctcctgcctcagcctcccaagtagctgggataacaggcatgcgccaccacacccggctaattttttgtatttttagtagagatggggtttcaccatgctggccaggctggtctcaaactcctgacctcaggtgatccgcctgccttggcatcccaaagtgctgggattacaggcttgagccactgcatccggcctacacggctactttttaaattctctgtagagacagaggtctcactatgttgcccaggctgggctcaagcaatcctcctgccctggcctcccgaagtgctgggattacaggcatgagccactgcacccagccagcatcaatctcttgaatgaatgagtgaatgatgttttctaggctcctacaatgtgccgaagcctgtgctgtgtgcttgggactcagcattgaccaagacagatgagctccttctaggcctttgtcgaacagcccaggacactcctcccagtgcccacctgctccctaatccctattttttctttttcttttcttttttttttttgagacggagtttcactgttgttgcccaggctggagtgcaatggcacgatcttggctcactgaaacctccacctcctgggttcaagcaattctcctgcctcagcctcccgagtagctgggattacaggcatgcatcaccacgccgagctaattatgtatttttagtagagacggggtttctccatgttggtcaggctggtctcgaactcccgatctcaggtgatccacccacctcggcctctcaaagtgctgggattacaggcgtgagccaccatgccaggccccctaatcccttttttttcatgtggccaaactactatttatcctgtgagtctccacacaatcaccctcacccagcaagccctcctagactccccagatgggtccaggtgccttctctgggctcccaacagcacttagggcgttcccccatcctgcatgcctccctgtcccagccttgtcctccctgctggtgcctccccatcccattcttgatcattctaggtcattcctgcctggtggggccttgacaagatctcttaggtgtccagaagtgactgtgggccccatgagggcagaactgagggctgtcttggttatcactatgtcccccacaccacccagcacatggccaggcacacagcaggaacctgtgggcaattattgaataaaagcataaatgagagggaggtgagggagagagataggggcaccatgggccctgccagaaaccagacagagacaatcatctcctggacagatcaaatgagttagttaggctctccctggcctccaggcctttgcacaggctgttccctttgcctggaatcttttttttttttttttttttgagatgggatctcactctttcatgtaggctggattgcagtagtgtgattatgactcactgcagcctcgacctcccaggctcaggtgattctcccacctcagtctcccaagcagctggaactacaggcacgtaacagcatgcatggctaatttttgtatttttgtgtagagaccgggtttcgccatgttgcccaggctgctctcaaaactcctgagctccagtgatccatcctccttggccttcaaaagtgctgggattataggcataagccaccatgcccagccccagaatactcttacacctctccttttcctgaccattctactcatcccttcaacatcagctatggtgcccctcctccaggaagccctccctgattctgggctgggtcaggtacctcctttgggctccccatcccagtcccacccactctgggtcatcactgccttacaggtctgttccccagctacctagccaatggactatatgagctctgtgagggcaaggatggggctgttttggtcattgctgtgtccttggcatcacccatcacagggcagggcagagaggtgctcaggaaacagattagccaatcactcaggtttccatgccacagaggggagccaggtctcagcactttcacaccagtatggggcggagaggggtcctaggcaaagtgaccccaggacaaacaatggggtggaccccagggagaaacaggggtgggacacacaagtaatcctcacctccacggctcaaccactgccgcacaactccggtgacatcaaaagataaccactctggcgagtcgctgggtgccagcagccggttgctgaggtatcgccaggaattgttgctgtatttctagaggatgatgaaggcaggagagagacagtgggtagatggtgtcacgaccccacatacactaactgaatccttcaccccatctgcttccccaaacaggcttccagaaagttcccaggcactaccctctcagacagccacctgtgtggtcctgtggcacccatcctccccaacagtacccatgagaggaggggtggagaaaaagctcaggctgcggtcaagtcaccttcacacagctcagccgaaggtgttttcttgccttctcgaggcctgtttcctcattggtgaaatgctaagccccactcagcgtggacagcccacaatgctaaaattctgctgctaacattctgggccgggcgcagtggctcacgcctgtaatcccagcactttgggagcccaaggtgggtggatcacttgaggtcaggagttcaagaccagcctggccaacatagtgaaaccccatctctactaaaaatacaaaaattagccaggcatggtggcacacgcctgtagtcgccactatttgggaggctgaggcaggagaattgcttgagcccgggagacacagactgcagtgagccaagatcacgccactgcactccagcctgggcgacaggacgagacttcgtctcaaaataataataataaataaaataaaattctgctgcaaacattctggggtttactgagcatacggttctgcaaatttgacaccctgaattctcagtaacttagaagtcatttctaatgattccggctgggcacggtggctcacgcctgttatcccagcactttgggaggccaaggcgggtggatctcctgaggtcaggagttcaagaccagcctggccaacaaagtgaaacctcgtctctactaaaaatacaaaaattagccaggcgtggtggcacacgcctgtaatcccagctactcaggaggctgaggcaggagaatcacttgaacccaagacacagaggttgcagtgagccgagattgcaccactgcactctagccagggtgacagagtgagactctgtctcaaaaaaaaaaaaagtcattttgtgattcaaatgtttgataatatcccaagatttccacttctagagcctgagaagctttagaagactaatgttctataaacccaagagtctgccatgccgcacctagatgctgcaggtacccaacatctgtgtagaataattttctgggccaggcacagtcgctcacgcttgtaatcccagcactttgggaggccgaggagggtggatcaccagaggtcagaagttcgagaccagcctgaccaatatggagaaacaccgtctctactaaaaatacaaaattagctaggtgtggtggtgcatgcctgtaatcccagctgctcgggtggctgaggcaggagaatcgcttgaacccaggaagcaaaggttgtggtgagccaagatggtgccattgcactccagcctgggcaacaggagcaaaactccatcacacacacacacaaaaaaaagaagaattttctggggctggatagtccactccagggactgcagaataaagctgaattccccagactccaagaagccaagctaacataggacaaagttctctcactgtgaaagtctgaaatctaccatcctatgagttaacattccctctgatatggattctagctcatagaaactgctagagcctccagcccttccagatgccccagtcctcttggaagctccctatcttctagagcagtgctgtcctaaagaactttctggaaatgtgctttatctgcaacatccaaaatagtagctgctaaccacatgtgactatagagtactagaaatatggccagtgagaatgaggatttctttttcatttttatttttttgagacagagtctcgctctgttgcccaggctggagtgcagtggtatgatctccgctcactgcagtctccacctcctggggtcaagcgattctcccacctcagcctcccaagtagctgggattacaggtgcctgccaccacacctggctaatttttgtatttttagtagagatggagtttcgtcatgttggccaggctggtcttgaactcctgacctcaagtgatccacccaccctggcctcccaaagtgctgggattgcaggcatgagccaccacgcctggcctatatatatatatttttgagacggtctcgctccatcacccaggctggaatgcagtggtgcaatcacagttcactacagcctcgacctcctgggctcaatcaatcctcccacctcagactactgagtagctgggactagaggcacgcatcaccataacaggctaattttagtattttttgtagagacgaagtttcaacatgttgcccagactggtctcggactcctgggctcaagcaatctgcctgcctcggcttcccaaagttctgggattagaggtgtgagccactatgcctggccctaaatttttaatttaattttaaacaatttaaattttaatcaagctaaatgtgactagtggctgtcatattggacagaatgattctagagcccccaaccttttcagagattccaactttcaagaatcctgtgtccttaaagagtccaactcctaagattccagccttctaagtgtttaacatcctaggatgcaaagagtctgaacatttaaaagtgctctaggttccgggtgcagtggctcacacctgtaatcccagcactctgggaggctcaggtaggagaatcacttgagggcaggagtttgagacaagcctggccaacatgataaaactctgtctctactaaaaatacaaaaattagcccagcgtgttggcacatgcctgtaatcccagctactcgggtggctgaggcaggagaatcacttgaacccaggaggcggaggttgcagtgagccgagatcaccccattgtactccagcctgggcgacagagcaagactccatctcaaaaaaaaaaaaaaaaaaaaaagaggccaggcgcagtggctcacgcctgtaatctgagcactttgggagaccgaggcaggtggatcacgaggtcaggagatcgagaccatcctggccaacatggtaaaaccccatctctaccaaaaatacaaaaattagctgggcgtggtggcgcacacctgtaatcccagctacttgggaggctgaggcaggagaatcactggaacccaggaggcggagattgcagtgagctgaggtcataccactgcactccagcttggcaacagagtgagacactgtctcaaaaaaaaaaaaaaagcgttctaggattgtatggtttgtgttcttctatccttcagggaccatctaggtggaccttgtaaccagccgacccacagccacccccttggtcacagctcaccctctccagcccatgccctgaccttccttctggctcatgtcctcacctggtacagctccacgtgctgctccacttttaacttgagcctcagcagacgcagctctgcccgggagagcaacacgggttcaggtaccgcttctcggagctctgatgtgttgaagaacatatatatgctgtgtgtactctgcttgaacttgtcatagatttctagcagggagaaatgaagggaggcgatcaggggtttggcagaggtgaggggagctggtgctcccaactctaggagttttggagctgacagctctggggtggagtcagtctctgataccttttatttatttatttatttatttatttatttatttatttatttaaatgaatttttttttttttttgagacggagactcgctctgtcacccaggcttggagtgcagtggcgcaatctctgctcactgcaacctccgcctccagggttcaagcaattctcctgcctcagcctcccgagcagctgggactaaaggctcatgccaccatgcccagctaatttttgtatttttagtagagatggggtttcaccatgttggccaggatggtctcgatctcctgacctcgtgatccacccgcctcggcctcccaaagtgctgggattacaggtgtgagccaccacgcccagccctgactgtgatactttttagctgtgtgaccttgaggaagtggtttctccccctaggtttgtttcctcctctgtaaaataggtcctaaccacattcctctctcatgtagcatcatctctcaagtcgactaaggctggcaccaaggggaaccactctgtttgctctggccttccttgccccaaatgcaagagcccctaaaatgcagagtaaggatcaaaggcacaggctttggactcagatagtgcctctgctgcctcttggctgtgtgaccatgggcagttaacaccctctttctgaatgtcagtttcctgttattctttgaaaaacagcaataacattaagctccctgcattcccacacagactctcctaatttaagcgctgtgtaaccttgggcaagtgaattcctctctctgagccaggtgtaagacaagacagagtgactctagaacccattccagtattatagtgggaaattagatgacccaggtcaagccatgtggcaccaattctgcatacactggtcactcaatcatgtatacgtctaagagtgctggctgggcgcagtggctcacgcctgtaatcccagcactttgggaggccgaggtggattgattacttgaggtcgggagttcgagaccagcctggccaacatggtgaaaccccgtttctactaaaaatacaaaaattggccaggcatggtgccggacggctctaatcccagctacttgggaggttgaggcatgagaatcgcttgaacctgagaggcagaggttatagtgtgccgagattgcgccactgcactccagcctgggtgacagagtaagactctgtctcaaaaacaacaacaacaaaaaaccacaaaacagcgctatttaccagatgctatctaaagcactttacaaagatgaagacatttaaacctcacaaccttatactattattatacccgtttaatagatgagaaactgaggcaccgagattaagtaatttgccccaaggtcacatagctgcagactgggattcaaactcaagctgtctcattccagagactgtgctttttttttttcttcccccaagagacagggtctcactctgtcccccagacggaagtgcagtagcacaaccatggctcacggcaggctggaactcctgggctcaagggatcctcacgcctcagcctcccaatatgttgagatcacaggcatgagccaccacacccacccagctagagactgtgctcttaacccctaagtgattcttctacttatttttattattagttttccacccttaactcccttccccagctggttagggaaagtgaagttcattctgggtaggaatggctgtagtggggagaaaaggaattaaggtgttttcttttctttttttttttttttttttgagatggagtttctgtcgcccaggctggagtgcagtggcgcgatcttggctcatagcaacctctgcctcccaggttcaagcgattctcctgcctcagcctcccaagtagctgggattacaggcgccgcccgccaccccgcccagctaatttttgtatttttagtagagaccgggtttcaccatgttggccaggctggtctccaactcctgacctcaggtggtccacccaccttggcctcccaaagtgctgggattacaggcgtgagccaccgcgcccagccaaggtattttctagtttaggaaaagtttggggatggggatgagggaacaggccatgaactgctggatcaactggggcaactgcttccagcctcccatagtgggggtgtgaaaagagactggtgagaaaggcagaggaaacccctcccctacggcccccttcgatcctcctcctcctccccagtctccctccccacccagccccagtaagccctattcttggcccggaggttactcagcaaaccccaaaggaaaggcagagccttggctggggaagacagatagggaggaagacagagaggagggagaggaagggttggagggtgatgcagagagggagaggcggggagatgtcagagacggagacgaggcaacaggaccgtggaggagaaaaatagaaagggagagaaaatagtcggagagacaaaaaccaggagacccatgcgtggacagaaagactaacggagacgaaaagaaagaggcagatggggagacacgtgcgagacgagacacatgtgcatttgttggggagaagaggattggaggtgtcagtgttaaaggaacctctacaacgaaggtgaagccacggaagataaggtaaggctgagacttgggtgcggagtgcgcgtcattgggctggagctgtaaactggcgcagaaatgggcagggaacccgcaagcccacaccgcccaagagtcagtgaaacctgagggatcttccccaaggctctgaaccacgcgggacgcctgggtcctcgcatggatgccgacggggccggctgagtgggagccccgcccgtagctggggtgaggagggcgggaggcgccgcagccaggagggcggggaccagacctgccccgtctcgccccgggctccgcgagcgatccccgcctccgccgggggcatgggaaggaaagggaagggagggggatgaggccgccggacgctggggtttccccagccaccctgagaggaactgggactttggggtccagactgccagcgtttagcgcagcggggtcctcctgccccttggtggaagcgcaggctcctccccccgcgcgtggcacccacgtggggctttctcactcctcccagcttggttttctcacctcggtcttgtagagtcaccccccacccagcacttcccctgcggctggactccgctcagcccattcccctgcatcctgcggggaatgcagcgtggatggcgctgggtatctctcctcctccccgctcacaccacctttcccacgcctgtctcccctctcggtaaagcccttcccatgacccaggactctaggtcttctggaagctcgattcctccgctgggctccccactctgtccctcacgtccctgtgtgaaacaccgaggacacctctgcatcccgggcgccctcccgagtctccgctcctctcccgcttgcctcctccttccaataacctcccgtccctttctccccacatttatcacacgcacctctgtttctctttctacgactctcccccacccccgcatcccgcgtgttcctggcagcctctggaagtgggtccgctctcactttcctggcaccctctggggttgccttcatctagcttttctgtccttcttgaatctttccacctcaggacccccaagctctgggtcaactttctccagcgcctctcctttcccaaatgctggggtcttcgcttctcccacaccaggctcccttctctgcacctggcaccccacgacccccccccccattcaacgcgtcctggaagagggagccttctaccctccccctattgcttgtctccctctaggggactgcccccacgaccccgcatgtttctgtcgcactctagaagcggtccacttcgctatctcctcctctccaagaccagacacctgggtggtagggggctcagtgccatcctctttcggacacccccctcccaccatcacacgttccctttgccccggggtgtcctcttcctccagccagtttcttctgccagtcacttcctacccgtggccccggcactccggcgccccctgggggcccccctcccggctcccctgcccctccgagctcaccgttgtgggtttccaccattagcacgcgggtgacctccttggcgtagtagtcggcctcaggctcgggctccggttctgcactctccccggccacccggtcgcgggtgctgttgtacagggcgagcacggcctcgggcagcgggccgggcggcacctccccctggctcggggggctggcgagccgcagcttggacaggatctggccgcggatggcctcgatgcgcttccgcttcaccagctccatgtcgatagtcttgcaggtggatagtcccgcggccggccggccaggcgtcagcaccagtagccacagcagcggtagcagcagcggcagcagccgcagcccggagggcggcatgggggaggcggcgccccccggcactgccgagagcgcgaacagggctggtgtggtggggaggccccgcccctgcaggggctgggggtctcccggcaaaaggtaggagggcctcgagggaaagctgaggtcctcagggagaagggcgcagtggtggaggggaggcttggaccgggggtgtctcagtatcccacggaaataacctagatgggcgcgatctggtaccagaaggtgggtggtcttgaataggggatctgtggcaggtcggagagagatccgtctcctggaggagaaagggtctaggatgcgcgggggctcaggagacaggccggggatgaaggcggcgtgcagggggtgcgcccgaggtctggggaaaagtctttgcgggaggccgggtcggcgactcccgagggctggtccggaatgggggcgcctgagggacgccgtgtagggggcagggagggagcaagcgtccccggcggcaaagggaggcggtctggggtccccaagtcctgcctcctcgcggggcagcgtcgcgccaagaggtccccgcgcctccggctcccagcggcaacggaaaagtctcaaaagtttttttcctcttctcccgaccagctcgtccctcctcccgctcctcctccccctcctccccgcagtggcgggggcggcggcggctcgtctcagactctggggcctcaggctgctcctcggcgactccttcctccgctccgggccgaggccggccccgcgggcggctcagagccgggggggtgccccggacggggcgtcccccctgcccccggccggggccctcgctgtctggctgctccgcggagggaggtgggagggagatggcccagggcgcgaagggcggcggcggcggggaccggctgggtcggcagggggttttgaagccgcccccggccccacccaggaagcgcacggggcgggagcgggggcggcccccagggggagggcatgggggggctgggccaccgtcctcatctcgcgtgggcgggctccgaggggggtcccttcagccctgggggaaagggggcgggcaccccggctccgccccgcaaacagggtgctgcctcctggcggccaagcgccaccaaagcgggtgatccagatgcgctgtggctttgcgggcggtgtgggtcaccagagaaagaggaccaggcggagaaggcttaatccgggggatgagacacaggggagccgaccagaggagggggacccagaacggaaggagagtcaggctgggaaacaaggtaggagaagagggtctgtcaacatgggggcctccggagggtgtcagtgggaggagggggcaacaggacacctgaaggatggaagggtcaggaggcagacacctgtaagaattgctctcctttactgagcacctcccatgtggctaagcagcctcctgtcactcaacaccctgcgaccccatacatttactgtccccaatttacagatagggaaactgggcccagagggaccccgaggtcctagaaaggacagaagcggtgccatgccttagctggggtcagctctgacagtctctagagtctgtgctcttgaccactgtgccatcctcccccatcactgggtgtccggggtgtggatggtggtgacgttggaggcagagtccctcagcactccacgccgtagcggtcgaagttgcggagcagcaggccgatctccaggtgcacggtgccaccagcagctgtgtgcaggcgatagcggtcggccccactgtagatggtgtccccatgcagcagctgcggcccaccacccacgaaagcccgtgccaactgttctcgccaactgcccaggggccgccacgtggggcaggccagctggtgggtgcccgggctactgggcacatggcaaaatccatagcctgcaagctggcagcggccaaagctgtcctgggaccacacctggaaatggagccggggccagcctgcaggaaaggagagagaggggaaaggagggatgggtggggaccagactcctgctgattccccactccctgatactcactggagaccccaggcccagtcttttcctctctgggtttctgtcccagagtttccaacccagcctcctttctaggctcccaccgtcttatctatccccacacagcagccaaagtgatctttccaaatccatgttactcccctgctaaggatccttccatagctccccagtgccctcagtataaagtccaacctcttcaacattcaaggcccttctaatcagacctctgctgaatttcctctctgtgttatcctcctccatgaccccatgtcagggcagcccattgctcctccagtccccaggtaaccatcatgggccttgtcagggacacctcctgccttccctcatgtccctgccctgctctctttgggcccagggccttctttcttgcccctctctaatccaccttccacctggcatctggaagcatctttctctccttccatagctttgcccatgtcctcagaacacagttcagctcctcagtctggtagtcaaagcccttggagatccagccccatctcatctcatgctgatcccttctcctgtgctagactctgttctagctagctggggacacggcagacatgaacatggatggcagacaaaaattcctgcccccgtgaagctgatatcctagacaacgaatgtagtaaataagcaaattatagggtagatcagatggtggtaattgctgtgagggaaaacagagctgggtagggtgagggtggggataccgctttagcaagaaggggatcaaggaagcttcattaagaaggtgacatttgagcaaatgctaaaaggaaggaagggagtaggccatgtggccatctagaggaagagtgctcctagccagagggaacagcaagtgccaaggccctggggggggactgtctggtggggacagtatggctggagcccagacggagtgtgcctggtggggacagcatggctagagcagaatgaggtggggagacgggaaggaggtgccagcctggttgtggagagccttgtgatgcatgctaagactatggctttcaccctgagtgagatggggaccattggagggttctgagcagagcagagatgggacctgacttaggtgttcacagggtcccagctgcatgtggggtgcagaccaggggggttggggaaggggactccagagacaagattcttgtcatagtccatgtgagagaagaacttggacagatcaaggtgctgggcgagaaaagggtaagaagtgggatttaggatgtatttcaaaagtagaggcagtttaagatttcctgatggacaaaatgggggcttgagaaaagagaaagcaaggctggtgccaccactgggggactggaggccccaagagctgaaaggttagagctgcccacctcacccacacagcaccggaaagattttttttttccccagctccagcttaaaagacagaaagattatttaaaagtgaaatctcagccaggcgcggtggctcatgcctgtaatcccagcactttgggaggccgaggcaggtggatcacctgaggtcaggagttcgagaccagcctgaccaccttggtgaaacgccatctctattaaaaaaaaaaaaggcaaaaattagccagatgtggtggcacgtggctgtagtcccagctactcgtgaggctgaggcaggagaattgcttgaacctgggaggcagaggttgcagtgagctgagatcttgccactacactccagcctgggcaacagagtgaaactctgtctccaaaaaaaaaaaggtgaaatctcacttgtccattacctgctctggctcccaagtgccttcaggagatggcctcagctcctcagcctggcactcaaggccctgcatggcctgtccccttctgcctttcccctctgccgtcccgctctccctcaatccactagatgcccttggctcactttcccctttgagtcttccacgtagctccctctgcctagaaccttcttctatccctctgccttattagctccgctggcccttcacagcaaagttcagaagccccctcctccaggaagccctctctgacctccctgacagagtcagccacttcctctgggctcccacagcctctccaaatcacctatcttagtcctgcccactctgaggtgccactgtctggagagaggtgtgtccccccataggacggtgaaccctgtgaggacaaggctaagggacactgccttgatcctcaatgtctccctggcatcacccaacacaggctggacacagggcaggtaccaggtagacgttctttatattggtgaaatatatggcacatttacctaggcaatttctcagaatcaactcatctccaggaacccacattttctactagaaaggctttctgatgccgctcctcccccagtactgatttcccctttgagcagcagctctactttcaagccgaggagcccttcctggagaaacagcccttgcctctctcagaccctgcctcccggcttcctctttattggagactctcgttttgtctctttacttgaatgccacctcccctcccaccctgaccccccaccttcccacctcctgctccaccctggcctctgccctaatcatacaaacttgggatcgcctattgagcaggcctgggaaggccttagctcagcctctccagggccagacttggctgcaaaagggacctacgtggtatggggagcagggacaggtcttggtgttcccagccccagggacctcagaggctactggccccctcccctcagcctggacccgggtccaggtgtgatacccaccttgaagacctttggtggcgaagtgcaggtcgatggggtgggaccagtaagccatgtcccctatctgcggggtgtccacttgcgtttggccctcccgcacgcctgacaggagcttccatgccgcccctgcagtgagagccgggacatagaggggtgggaggcagccatcgggaaggggatgccgctgtggctataggactgtttctctgtggcatctactggtaggggttacgaagcatggactctggaaccaagtatctgggttcaaatcctggcactacctcttcctgcctctgcaaccttgggcaagttagctttctctgccttggtctccccatctataaaatgagctgagtaataatgcattcctcattgtcttcatttgttttctgttactcttaacataatatccaaaactggataatttataaagaaaaggaatttctatctcacagttataggagactgaccaaggtggaggagccccatctagtaagagccttcttgctggaactcttcagagagtcccaaggctagtgtgctaacatgccactcacgtctctctctctcattttataaagccaccacttcctctcccatgataacccactaatccattaacccattaatccatgaatgggtaatgagcatagtgagcacgggataagtcttcaatatcattttattacgattctcaccccatattttcaagcctagtccaaggattaagatggggccaagggtaccctccaggagcgcatcctgaaacacacataacaatttcgatcctactgaggggtgataatgatagctaaaatgcactgagtggtaggatacagtggctcacacctgtaatctcagcactttgggaggccaaggcaggtagatcccttgagtccaggagttcaagaccagcctgaccaacatggcaaaaccccatctctacaaataatataaaaattaaggctgagcgcagtggctcacacctctaatcccagcactttaggaggcttaggggggggtggatcatctaaggtcaggagttcaagaccagcctggccaacatggcaaaacctcgtctctactaaaaatacaaaaattagtctggagtggtggcaggtgcctgtaatcccaggtactcgggaggctgaggcacgagaatcgctggaaaagctgcagtgagccgagattgcaccactgcactccagctggtgtgacacagtgagactccatctcaaaaaatgaacaaacaagccaggcgcagtgactcacgcctgtaatctcagcactttgggaggctgaggcgggctgatcacctgaggtcaggagtttgagaccagcccggccaacatggcgaaatcccatctctactaaaaatacaaaaattaggatgggcgcagtggctcacatctgtaatcctagcactttgggaagccaaggcaggtggatcacttgaggtcaggggttcgagaccagcctggccaaaatggtaaaactctgtctctactaaaaacacacacacacacacccacaaaattagccacgtctgtaatcccagcactttgggagactaaggcaggcagatcacaaggtcaagagatcgagaccatcctggccaacattctgaaaccctatctctactaaaaaaatacaaaaattagctgggtgtggtggcgcacgcccatagtcccagctactcaggaggctgaggcaggagaatcacttgaacccaggaggcggaggttgcagtgagccaagatggtcccattgcactccagcctgggcaacaagagcgaaattccatctaaaaaaaaaaagaaaagaaaaaaagaaaatgcaccgagtactaactaaatcccagatgctatgctaagtactttaagcatccattcatttaatccaccctctaggactcttaatcccctcctcaccccccagtttacagaccctccaccatggcccacgtggcctggctcttgctcccctccctgagttcatctcccatcactctccccctccctcatcaccctctggcctcactgtcccacttctgactccccacctcagggcctttgcactggctgttccctctgcctagaaagctctgctcctgggtgtccccatccctagcttttgttttcatccttcagggcccagctcaagtgccacttccacagaggggttctccctgaccctcttcaccaaacactagtccctgccacatcatttcttttcatcctagcacttaccactgtctggaatcacggtgctcctttctttttttgggggggtggggggagacaagatctccctctgtcacccaggctggagtgcagtggcacaatcacagctcactacaaccttgacctcccaggatcaagcaatcctcccacctcaacctcccaagtagttgggacgacaggcacacagcactatgctttgctaattttttatttatttgtagagacgggggtctcactatgttgcccaggctggtctcaaactcctgggctcaagtgatcctcctgctccagtctcccaaagtgctggcattacaggggtgagtcaccacacccaactgcactcgtttatctgtttatttattttattttatttatttttttttgagacagacttttgctcttgttgcccaagctggagtgcaatggcaccatctcggctcactgcaacctccgcctcctgggttcaagcgattctcctgcctcagcctctcgagtagctgggattacaggcacacgccgccatgcccagctaattttttttgtatttttagtagaaatggggttttaccatgttagccaggctggtctcaaactcctgacctcaggtgatctgcccgcctcggactcccaaagtgctgggattacaggcatgagccaccgcgcctggcctgcttatttattttctgtctcccctactgtatggcccaggaaaacagggaccttgcacactgctggatccccaagaccacaaacccagctcttggtatacagaaggtgctcaataaatgtttcttggacaaataagtgatcctaggaggtgggagctaatataatccccatttaacaggtaaagaaacaggctctgagaaggtgagttcatgaacatttattcagcacctgctatgtgccaagcactgttttccatgctggtgacatagcagtgactatagcagaccaaggtcccatcatgggactggattcagactcagctctaactgcagagcccaagcctttcatccaactgcctcagtattcttggctggatcaacatccccagcaactccctgaaataataaaaatcaggttagtcattactcccttctgggctgagttgagggaagcaccaggccctgcgtcaggctccttaaaagcaagatttcccaacagccctatgaagaacaaatgaggaaactgaggctccaagaggggacagcctctgcccagggtcacagagaaggtgagtggtccaacctggaaaccaagtctgactccagagcctgcccctcatccatcagctggagggttccgatttcctgggaatttcaacttccacctcacttacctgtagaatcaaaaaggacccaggggccaggcgcagtggctcacacctgtaatcccagcactttggaaggcctacgcaggcggatcacttaaggccaggagttcgagaccagcctggccgacatggtgaaaccccatctctactaaaaatacaaaaattagctgggtatggtagcgggtgcctgtagtcccagccactcgggaggctgacataggagaatcgcttgaacccaggaggcagagattgcagtgagccgagatcgtgccactgcactctagcttggctacagagtgagactctgtctcaaaaaaaaaagggccaggcgcagtggctcacgcctgtaatcccagcactttggaaggcctacgcaggcggatcacttaaggccaggagttcaagaccagcctggccgacatggtgaaaccccatctctactaaaaatacaaaaattagctgggtatggtagcgggtgcctgtagtcccagccactcgggaggctgacataggagaatcgcttgaacccaggaggcagagattgcagtgagccgagatcgtgccactgcactctagcttggctacagagtgagactctgtctcaaaaaaaaaaaaaaaaaaaaaagggccaggcgcagtggctcacgcctgtaatcccagcactttgggaggccgagatgggcagatcacaaggtcaggagatcgagaccatcctggctaacacagtgaaaccccatctctactaaaaatacaaaaaaaaaaaaaatagccgggcatggtggcgagcgcctgtagtcccagctatgcaggaggctgaggcaggagaatggcatgaacctggaaggctgagctagattgcaccactgcactacagcctgggaaacagaacgagtctcaaaaaaaaaaaaaaaaaaaaaaaagggactaggactcaggcctgaagacatgataatgccaaatggccacatctgtttcatagacattcatctgtgccacgcaacaacataccccaggctttacaaacaagaccccatcaaagtcttgtataagccaggcaaacactgaatgagcacttcctattccagccctattcctattctaagtgctgttgatactcgtttagtactcatgacaacttcaacaggtaaatatttctatgactctcattgtacaaacaaggaagtcgaggtgaagagaagtgcccaagttcacataatcagcccaagggtgccttaacaagcaataactggttttgaacccaggcagtctgtgctcttaacctcaaacctgtgctgcttcttagctactattagcttcactttgaaacaaggaaactgaggctcaaagtggtcgagtccaaaggtctccaattaataggtgggggagttaatatttaaatgcagatctggcagcccatgaccctaaccattacactataccatgactctatagggcctcagttggggaagcatgaacaaaattactttcctgggacgtggcggctcacgtttttaatcctagcactttgagaggctgaagtgggtggcctgtttgagcgcaggagttcgagaccagcctgggcaacatagcgagaccctgtctctacaaaaaataaaaaaaattagccagatttggtggtgcgtgtctgtagtcccagcttctcaggaggctgaggcgggaggatcactagagcccgagagttcgaggctgcactgagctatgatcacaccaccttactccagcccgggcgcagagagagaccctgtctgtatcccacccctcacacacacaaagatgggagcttgagactcatgtggacagggtgtgggctgggcctggagtactgagaactgatggaaatgaggttaagagtctgcgttaaggggtggaggaaggagcatgtagcctctaggctaggggtcttggtgtggaaatgaaccaggcttgggggaatacctgtgtgaatgccccacttgcagaagaggctactttccgagaaaccgctggcccctatgatctgcccgatcacgtgcacctcagccatggccctgggaggggaaaaatataatcacaaccctgtgaggtaagtgtattatctccatttgacgggggggaaactgaggcccagcaagtaaagggtagtactaggattccaagctagcttcgtcacacccctgaggctgaggtcttgaccacagatcctaattgccaacccatgaaagcctggaaaaaatggggggacccttgtctggggaaccagcatttaactctgggaagtccaaaataaccttttcgggttcaggtcggcggaaagccccgcccgaaggggctatggctccgcccacgagcgcaaaagacccgccttccgcgtcacgccagccaccccgcttccctcccccagcaagctccataaggcgcatgcgttatgagttcaggtccgacttaaccccgcctctaagcgcagcgcatgcgtcattcctaccttagcgcacttaacggttaggagaggagaaagcggcaaccggggttgtagttcatgggcttgactgcttcttttctccgcgggcgccgaccaggcctggctcgcgcctctcccaggacccgcctggctgcgagatatgtaagccgcgatacttccgcgaccgcgctcgtcttggtttccgtggttgttgctggggcaacagcaggctcctcccctagctttgtactcgctctgcgcgctactaattggtgctagccgtctgcggggggcggggtgaagctgtgatggacattttcctcctccgctccattttgggaaaatagcgtctctccagctacggcaaagggttccgccattttgggcgtggctaggaagctgccatgttgagtgtggctgaggaagtttgagtgcagtttctcccagataccttctttaccaaaaaagcaaatccctaactgctccgtgctgcgcctaccccaccgaagagctctctgtggtccgggatcacaaatcagagattgaaccaggaccaagggggaattccttccaggacctcgtgtacatccccggccttgtaactggaaaacaaagcaaaaaaatcactcctcattcagagagtggagaagttggggagtgggttctgcttccgttttagagttcccctaggtttctcaaggacaaggaaggaaggaagttggataagtccaacttccttctcggagctactaccaagttcactgttactgcttgattctgagcaaggagcggttggggtagcgaagagaaatgaggaactaagattcccttatttgcagaaaatcctctttcctattgattgatttatcaatcaagaaatggagatgttgtccctggatgccatcctagatgccatcatttcccacatcaagccagtcatcaggtcccatcaaggctccttaaaagggtctcactctgtcacccaggctggagtacggtggctcgatcacagctcattgcagcctcttaactcctgggttcaagggatcctcctacctcagcctcccatgtagctggtatcacagacatgcaccaccacggctggctaattcttttttttttttttaagagatggagtcctgctatgttgctatgttgcccagtcttgtcttgacctcctgggctctagctatcctcccagttctccctcccaaactgccgggattacaggcgtgagccacccagccaggccaatagatacaaagtatttacaagctaccattggctaggcgcggtggctcataactgtaatcccagccctttggaaggctgaggcgggaagagctcttgaggccagaagttcgaatatagggagaccccattaataatgcatatatcaactagtgaagtattccattgaattgtttaatataaatgttatcctattgaaatgttgtaccctcgttataattttggttttttactttttgagatggcgtctccccctgtcatccaggctggagtgcagtggtgcgatcccagctcactgcaatctctgcctcccgggttcaagagattctcctgcctcagcctcccgagtagctgggactacaggcgtgcaccaccacacccagctaatttttgtatttttagtagagacgggttttcaccatattggccagaccggtctcaaactcctgacctcaggtggtccacccgcctcagcctcccaaagtgctgggattacaggcgttagccaccgtgaccggccgggtttttttttttttttttttttttgacagagtctccctctgtcgcccaggctggagtgcagtggcatgatctctgctcaccacaacctccgcctcccaggttcaagcaattcttctgtctcagcctccttagtagctgggattgcaggcacccaccactatatctagctaatgtttgtgcttttagtagagatggagttccaccatgttggtcaggctggtctcgaactcctggcctcatgtgatccttctgcctcagcctcccaaagtgctgggattacaggcatgagccacctcgcctgggcccagctactttttgtattttcttttttattttatttatttacttttttttttttttttttttgagacagaatcttgctctgttgcccaggctggagtgagcctctgcacctggcagaggtttcacttttaaatgatctttctgtcctttaagctggagctggggaaaatgtatttatttatttatttatttctggatgctgtgtgggtgaggtagacagctctaacctttcagctcttggggcccctggtcccctagtggtggcaccagccttgcattctcttttctcaagcccccattttgtccatcaggaaatcttactgcctctacttttgaaatacaccctaaatcccacttctcacctctttgtcgccctgcaccttgatctgtccaagttcatctatcacctggactatgacagggaccttgtctctggggtcccctttgccaacccctctagtttgcaccccacatgcagctggaaccctgtgaacacctaagtcaggtcccatctgctcagacccgtccagtggtccccatttcactcagggtaaaagccaaagtcttatcatgcatgacaaggctctccacaacctggctggcacctcctgcctcatttttgtatttttagtagagacggggtttcgccatgttggccaggcaggtctcaaactcctgacctcaggtgatctgcccaccttggcctcccaaagtgctgagattacaggcatgagccactgctcccggctgaggtcttcattctgaaggctcccatgtatacatgttaaataaaagaaaataaattatcgtcaactataaataatgagattcagaaaatatgattgaggccggattcggtggttcatgcccgtaatcccagcactttgggaggccaaggagagtggataccctgaggtcaggagttcgagaccagcctggccaacatatagcgaaaccctgtctctactaaaaaataccaaaactagatgggtgtggtggcacatgcctgtggtgtcagctatttgggaagctgaggcaggagcatcacttgaacctgggaggcagcagttgcagtgagccgagatcacgccaccgcacttcagcctgggcgacagagccagacttctactctcaaaaaagaaaaaaaagaaaagaaaggaaaatatgattaactatagagtttattccaggctacaggaccagtacatatgttacaacagtttcattagtacatcttgctatgctgcagggaagattgcgttaacattctgataggaggaggagtactctttctttctttctttctcctttcttttttcttgagataagatcttgctctggggctgggcgcggtggctcacgcctgtaatcccagcactttgggaggttgaggcgggcaaatcacgaggtcaggggttcaagaccagcctggccaacatgatgaaacctcgtgtctactaaaaatacaaaaattagctgggcatggcggcgggcgcctgtaatcccaagtactcgggaggctgaggcaggagaatcacttgaacctgggaggcggaggttgcagtgatctgagatcgtgccattgcactccatcctgggggacaagagtgagacaaagtctcaaaaacaaaacaaaacaacaacaaacagatcttgctctgttacccaggctggagtgcagtggcacaatcacagctcactgcagcctcgaacgcccaggctcaagcctcctgcctaagcctccccagtagctgggactacaggcgtgtgccaccatgcccagctaatttttcaataattttttctgtagagacatggtctcactctgttgcccaggcttgtctcaaactcctgggctcaagtgatccacctctgcctcccaaagtgctggggttacagatgtgaggccacaacacccggcctaggagtaatgttctgaggtgatcttatctctggcactgcttggtcattcttaatcatttacaggaaaaagcagaagttgtaactgcatgctacgtgactcaggctacatagcaacattcctctcaaggcttggaataatttaaagttccaacagctttaagtttgaattatctaaccacattatcgaaagttggccaggcctggtggttcatggctgtctgtaatcccagcacattgagaggccacagcaacaggatcacttgaggccaggagttctggaccagactaggcaacgtagtgagaccctcatttctacgaaaacgtttaaaaaaaaaatagcagggcatggtgacacatgtctgcagtcccatctacttaggaggctgaggcaggaggatcccttgagcccaggagtttgaggctgcagtgagctgtgatcatgccaaggtacttcagcctgggtgacagagtgaaaacctgtcaccttttttttggggggggtggttattgggtttttttgagacagagtctcgttctgtgggccagggctcacagcaacttctgcctcccaggctcaagcaattctcctgcctcagcctcccaagtagctgggattacaggcatgtgccaccacacccgggtaatttttgtatttttagtagagacggggtttcaccatgttggccaggctggtcttgaactcctgacctcaagtgatccacctgactcagcctcccaaagtgctgggattacaggtgtgagccactgtgcccggcctgaagctgttttaaaatatatccacaaatgcttgggcagccccctttcagtaagtggagcctaattctccttcccttcagtatggctagtttttgtaatttgcttctaaccaatagaatatggggctgggcacagtggctcacacctgtaatcccagcactttgtgaggccaaggcgggcagattgcttgaatccaggagtttgagagcagcctggacaacatgatgaaaccccatcactacaaaaaatacaaaaaattagctgggtgtggtggcatgcccctgtagtcccagctactctggtggcggaggtgggaggatcgcttaggttgagagttggaggctacagtgagctgtgattgtgccactgcactccagcctgggcaactgagtgagaccctgtctcaaaaacaaaatgcttttaagccaagtatggcacacagccggcggtcccggctacttcatttttgttgttgttgttgttttgagacagagtttcactcttgttgcccaggctggagtgcaatggtgtgatctctcctcaccacaacctctgcctcctgggttcaagtgattctcctgcctcagcctcccaagtagctgggattgaaggcacctgccgccacgcccagctaattagtagagatggggttttgccatgtatggccgcgcctggccatcccggctactttggaggctgaagccggaggatgccttgagtgcaggaagtccaggctgcagtgagctatgatggcaccctgcactccagcctgggcaacaaagtaagactgcacctctaaaaaaaaaaaaaaaaggcccggtgcagtggctcatgcctggattcccagcactttgggaggccgaggcaggcagatcacttgaggtcaggagttcgagacaagcctggccaacatggtgaaaccccatccctcctaaaactacaaaaaaaatcagctgaacgtggtggcgagcgcctgtagtcccagctactcgggaggctgaggcacgagaatcacttgaacccaggaggtggaggttgcagtgagccgagattgcaccattgcactccagcctgggtgacagagcgagactctgtctcaaaataaataaataaaaataaataaataagccttttaattgtggtaaaatacacatttaccatcttaactgtttaaaactgtattgttcaatagtgttaagtacatttacattgtgcaaccaatctccacaaccattttcatgttgcaaaactaaaatttttgcaaagtaaacacatttttgaaacaaaacaactcccctattcccccctcttctgcagctcctggtaatcaccatcctattttctttcaatgtatttattttactttatttatttatttattttttgagatggagtttcactcttgctgcccatgctggagtgcaatggcatgatctcagctcaacgcaacctctgcctcccaggttcaagtgattctcccacctcagcctcccgagtaactggtattacaggcatgcaccaccatgcctggctaattttgtatttttagtagagacggggtttctccatgttggtcagactggtctcgaactcctgacctcaggtgatctgcctgcttcggcctctcaaagtgctaggattataggcgtgagccactgtgccccacctatttatttatttttattttatttatttatttatttatttatttatttgagacagagtcttgctctgttgcccaggctggagtgcagtggcaccgtgtcagctcactgcaacctccgccttccgggtttaaccgattctcctgcttcagcctcctgagcagctgggactacaggcgtgtgccaccttgtccagctaatttttgtatttttagtagagacggggtttcaccatattggccacgctggtctcgaactcctgaccttgtgatccacccgcctcggcctcccaaagtgctgggattacaagcgtgagccaccgtgcctggccacctatttatttttttgagaggaagtctcattgtgttgcctaggctgtggtgtagcaacgtgatctctgttcactgtaacctctgcctcctggcttcaagggattctcctgcctcagcctcccaagtagctgggattacaggcatgtgtcaccacgcctggctaatttttgtatttttagtagagacagggtttcaccatgttggccaggatgtactcgaactcctgacctcaggtgatcagcccgcctcggcctcctaaagtgctgggattacaggcgtgagctaccgtgtctggcctgttttttattttttttgagacagggtctcgctctgtcacccaggctggagtgttctggtgagatctcagctcaccacaacctctgcctcccaggttcaagcaattattgtgcctcagcctcccgagtagctgggattacaggcatgcaccatcatgcccggctgacttttgtatttttagtagagacggagttttgccatgttggccaggctgatttcgaactcctgacctcaggtgatctgcccgccttggcctcccaaagtactgggattacaggtgtgaaccaccatgcctggcccactatcctctccttccttccttccttccttccttccttccttccttccttccttccttccttccttctttccttccttccttctttccttcctccctccctccctcctttctctctctctctttctctctctctttctttctttctgttgctctgtctccaggctggagtgcagtggcacaatcttggctcactgcaacctccacctcctgggttccagtgattctcctgcctcagcctcccgagtagctgggactacaggcgcacaccaccaagtccagctagtttttgtatttttagtagagatggggtttcaccatgttggccaggatgatctcgatctcttgacctcgtgatcggcctgcctcagcctcccaaagtgctgagatcacacgtatgagccactgcacccggccactatcttattttctgtctctgtgaatgtgactactctaagtacgtcatgtaagtggaatcctacagtatttgtcctcttatgacaggattatttcacttagcatagtgtcctcaagggtcatccaggtcatagcatgcaacaggatttttttccttcctgacccccctttttttgacttggagtcttgctctgtcactcagactatagtgcagtggctatcacagccactcctggactcaagtgatcctcccacctcagcctcccaagtagctaggactacaggtgtgtgccaccgtgctcggctaatttttttttaagttttggagagagagggtggtctcagtggctcccgcctgtaatcacagcactttgggaggctgaggcagtagggggcgggggtggggatcacttgagggtaggagttcgagaccagcctgggcaacagggtgaaaacctgtgtctactaaaaatataaaaattagctgggcatggttgtgcgtgcctgtaatcccagctactcggaggctgaggtaggagaatcacttgaacctgggaggcagaatttgcagtgagctgacattgcgccactgcactccagtctgggcaacagagtgagacttcctttaaaaaaaaaaagttttgggagagatgggggtcttactgtgttgcccaggctggcctggaactcctgggctcaggcaatcctcctgcttcagcctctgggattacaggcatgggattacagtgctgggattacaggcatgagccactgtacctggccagcactttattttattgttatttattattattactttgttttttcataacattgatgttttgaaggttataggcgacctcctttgtagagtgtccctcattttggctttgtctcatgtttcttattattagatttaagttatgcattttggcaggaaaaccaaagaaatggtatgtgtctccctctttgcttcagaccagaggcaactaaggtcaatttgtcctgttaatggtgatattaacttgtatcatctggttaacgtgatgtttgccaattttctccattaatttttttttgttataataagtaatctaggggaagctactttgagactaaataaatatcctgttctttatcaaatcagattttcacccaataacttaatagtttcagtctctgttgacaatccttgctggaatctcgtgatcttttgtttttgtttttgtttttgtttttgagactgggtttcactttgttgcccaggctggactgcagtggcacaatcatggctcactgcaacctccacctcctgggctaaaccaatcctcctatctcagtttcccgagtagcttggaccacagacatgcatcaccacacccagctgattttgtttattttttgtagagacaaaatttcactttgttgccctggctggtcttgaacttttgggtttaagtaatcctcccaccttggcctcccaaagtgctgggattacaggcttgagccaccgtacccagctggaatctcatgtttaatattccagacctgtcacaaacactaagaggtgtagcctcttagactgtacaaggctaacggcagccagagagctctcactggaagtgaattaatctctaggatggcctagagggatgaggggacccacagagctcaatgatttggtgaaaaactgaggctggaggctgatgggaatttatgcccccatcccacacatatgtaataaagacccactttgtgccaggcactgttttaggccgtgaggcacagtagtgaaaaaacgagatcaaatctcagcccttgttgtgccgacactgatgtgggaggattcaaactacaaacaagaaaaatacatggtatgtttaaggccgggtgcagtggctcacgcctataatcccagcactttgggaggccaaggcgggcagatcacttgaggtcaggagtttgagaccagcctgggcaacatggtgaaactccgtctctactaaaagtacaaaaattagctgggcatggtggcaggttcctataatcccagctacttgggaggctgaggtgggagaatggcttgaacccaggagatggaggttgcagtgacctgagatcgtgccactgcactccagccttgctgactggggttttgctatgtcgcccaggctggtttcgaactcctaggctcaagcagtcctccctcctcggcctcccaaagggctgggattacaggcgtgggccaccgcacctggcctacagtatgcttcatagaaatatgaaaagaatgagagcaaggttgagatagaaagtaacagggcatccctcctgagtaaaacaatcctgccccctcacgctctcgtctaccctcccgtgggtctccctgcttctgtcgtctgccagaaactggctgagccaagtgcacttgcagacgccatctgttctccctgggagtggggccggtgccagcgccagcatctggactcttggcaaggagccctggagccctggagcgagggaactccggccccacaaaggccagggaatcctccagtctggtgagacggagggcttctgggaagggaggcctatacaaggctccatgaaggaggtggaagcttgcaagacgatgatagtcttgtaatcagtccgatggagatggatgtaaataataatattaataaacaccatcaaatgtgttcagagtgctttctttgccaggctttggataaatgttggatatctgttctttttattttttatttttctatttcctaggcagcacctaaaccaaaataggttcagagaggctcccaatgttggacatttgttgttgcagcaactctaagtactctacatatgttatcacataagaggcaaggagcattatccccattttgtaggtgaagaaataggggttcagagaggtgaaggcattgtctagaggccacacactcagtgacttaaagagcctggaaaggggccaggaatggtggctcacacctgtaatcccagcactttgggaggctgaggcgggtgggtcacctgaggtcgggagttcaagaccagcctgactcatatggagaaaccccatctctaccaaaaatacaaaattagccaggtgtgatggcgcattcctgtaatcctaactactcgggaggctgaggcaggagaatcgcttgaacctgggaggcggaggttgcggtgagccgagatcacgccattgccctccagcctgggcaacaagagtgaaactccatctcaaacaaacaaacaaagagcctggaaaggaaaccaggtctatgtgggtccaaatgctgactcatgaacatcactgtaccacgtgacaatcagagcatcaccccctactggaccccactcctcagccttctttccctagaaactcctaacccacctgcctctgcttcctcctcacccattggcttagcaagggccacaggaacacagcccggggttacaatatgctgggcttggtaccagctgtttactgtggccaagtgagcatgcaagtgagcccgtttattttcttttctttttttttttttttttttttttttgagacggagtcttgctgtttcccaggctggagtgcagtggcgcgatctcggctcactgcaagctccgcctcccgggtccacgccattctcctgcctcagcctcccaagtagctgggactacaagcgcccgccaccaagcccggctaattttttgtatttttagtagagacagggtttcaccgtgtcagccaggatggtctggatctcctgacctcgtgatccgcccgcctcggcctcccaaagtgttgggattacaggcgtgagccactgcgcccggcccgtgagcccgtttctttatctgcaaaacagggattaaaaacaagccaacaccccttcagcactcctccgcaaaaaaacaccccaaaacaaaataggccaggcgcggtgactcacacctgtaatcccaccgctttgggaggccgaggctgcagtgaacccaggagtctgaggctgaagcgagcaatgattgcgccactgccttccagcctgggcgatcagagcaagaccccgtcttttaaaaaataataataaaaaaaaaatctgccgggcgcggtggctcacgcctgtaatcctaacactttgggaggctgaggcgggcagatcacctgaggtcaggagttcaagaccaacctgaccaacacagcgaaatctcatctactaaaaatacaaaaattagctgggcgtggtggcttgcccctgtaatcccagctactcgggaggctgaggcaggagaatcgcttgaacccgggaagcggaggttgcggtgagccgagatcactccactgcactctagcctgggcgacagagcaagactccgtctcaaaaacaaaacaaaacaaacaaaaaaaccaaagtaaaatagcagcgacaacaacaacaacaacaagaaaaacccggagctgagaggaagaatgaatgcgatgatgaatgtaaagcgtttaacacagggcttgggtacagtctgccctcaatgaaccaatgatgtacccctaggcaatttacctaacctcggcttgccagtttcctcccgcgtgaaacaggacaataaacgattatgcctcttagggttgtgctgaggaatacatgtgtatgtaagtttatttgcaaagcacttagaacagggcgcacggtccttgttgctgttattattattggctattattgcgcaaaggggaagggaggcggggccaagccaggaaggccctggagaatccggggtgccccctcctccggcagagcttgggcctgggctcacgaggaaggggctgcagttctccaaggattcccgcctgctcccagacccccgggagtcgtaggaacccgttcctggacgctgacgtcggctttcagggatccctcgccggacgccgcggagggacagagcctgggaagccgtcgccccgccccgtccccgcccccgcgcgcagcgggcccggggcgctgagacccgcgtagagcaaagcgcaaggtcccagcgccccttggatcctcggtggcagggtccgggcaagtgtcattgcgagggttcaggaagccccggcctgtgatcgtgagcggtgagtgagggacgtaggtgggtgggggtcacagtcccttccctgggtcctggagttggggatgagagggcaaagctttggcgaggaaatcggctcagtcaaggtttggaatgagcaggcaggaggcttggggaccttccagggggatcgtaggacgagaagaagaatattctttctggttgtgttgcgtgtgtacgtgtatgtgtgtgctggggttgagggtgtttatgggggcgaggtgtgcaaaggattctggagagctggtgcatgtgtgggagttgtgtggagtcataggtgtgtgggtggagtagggcaggggtgcctgggcctgatgagtggggcaggcatgccagaggtcatgagaataggagagagtgccggggtgcatgtgtgcgtgtgtgcacaggtgtctgtggtttgtgatgcagtggggagtagggttgtgcacggagtcaattgggataaatgtgtaagaaggttggggacctgaaaggggtgttttctgggagctgatgttttggggcaaatattcaaggagtcctttgggagatgaatgtgtggaggtggaggctgggcttgcctagatggggctgtgtggcaggggacttcggggggcaggtctaggggacagaggatggggaatgtagactagagtgcagttccaggcagcactgggggtaggggatgggtgtgtgtgtgactgggaggggtgcctgggcctggataggtggtcacgcggtatgaacctgggatggatattgggggtgtttgtggggcaggtaagtgtgtaaggcatggtgcaacaggtgctgcaacttattggggtaagtgtgatgggtatgtggcttttgcctgagagaaatgcccagaatttggctgggtgcggtggctcacgcctgtaatcccagcactttgggaggccaaggctggtggatcccctaaggtcaggagttcgggaccagcctggttaacacagtgaaaccctatctttactaaaaatacaaaaaaaaaaattagccgggcatggtggtgggcgcctgtaatcccagctactcgggaggctgaggcagaatggtttgaacccgggaggtggaggctgcagtgtgctgagatcatgccactgcactctagcggatctgcagtggtggatctgcctgggcaacagatggagactttgtctcaaaaaaaaaaaaaaaaaagagagagagagagaaatgcccaaaattgaatgtccagacccctgagttctcttcataacctgaggccaatctttttttctctctgggcctcagcttctgtatctgtaaaatgggtctgaggaccactgcactaactagtctctgcctgagtctctctaaagcaaggggtcagaggttgagtgaagtgagacttttacaacttgtctttttcttccccctacccctaggaaacccctcctggagtttccccaaagccatggacagccctagtcttcgtgagcttcaacagcctctgctggagggcacagaatgtgagacccctgcccagaagcctggcaggcatgagctggggtcccccttaagagagatagcctttgccgagtccctgaggggtttgcagttcctgtcaccgcctcttccctccgtgagcgctggcctgggggaaccaaggccccctgatgttgaggtaggaaacagcaggccttagtggaaggcacgggagggggctggggtgagccccactaaggccagcatctggcaggttgacagctgtgccgatctgccttaggcctggagtctcacttcccagctgtgtgtgggcttctgagatttccagttacggttcttcttgttttatgtctctcatctttgttgcctggcttttggctctgtcttccctctgatctcagactccgctggttggtgtcttcagagtgcatgcacctctggcttttgtccaccctgctgtctccctctttgtgtgtgtgtgtgagagagagagagagagagagagagagagacagggtctcgctctgttgcccaggctggagtgcagtggagcgatcatagtttactgcaaccttgacctcccgggcttaagcaatcctcccacctcagcctcctgagtagctgggaccacaggcatgtgccaccatgcctggctaattttttggtgttttttgtagagaagaggttttgtcatgttgcccaggctggtctcaaactcctgagctcaagcaatctgcctgtcttggcctcccaaagtgctaggattaaaggtgtgagccaccatgcccagccttccttttttttttttttttttttttttaagttactgttgtcactttttataatttctcattccaggccaggcacagtggctcacactggtaatcccagcactttgagaaggcgaggcaggaggactgcctcgcccaggagttctaggctagcctgggcaacttagtgagactccatctttatttttatttaatttttcattttgtcctccgaaaattagaaagaccccatcttaaaaaaaaaaaaaaaaattagccaggtgtgatggcgtgttcctgtagtaccagctacttgggaggctgaggtgggaggatcgcttgagcccaggctgcaatgagctgtgatcataccaccttactccagcctggacaacagagcaagacagacagaaagaaagaaaaagagagggagaggggggagagagagagagagagaaagagagagggagggagggaggaaggaaagaaagaaaagagagagagaaagagagaaagaaggaaggaagaaagaaggaatgaaggaaacaaggaaaggaaggagggaaggaaggaaggagaaagcagaaagaaaggaaggcaggcaggcaacaatcatgatgaactcttacggtttctgttggtcaggaatttgggacttagttgcatggttctgcctctggatctttcttgaggttgcattcagctggtgggtggaactagaacagtcaggggctggctgggcacttttctctctcttcatggtgtcttagggcttcctttttttttttttttttttttttgagatggagtttcacccttgttgcccaggctggagtacaatggtgcaatctcagctcactgcaacctccgcctcctgggttcaagcaaattcccctgcctcagcctcctgagtagctggatttacaggcatgtgtcaccatgcccagctaattttgtatttttagtagagacagggtttcactatgttggtcaggttggtctcaaactcctgacctcaggtgatccacccacctcagcctcccagagtgccagattacaggcgtgagccaccgtgcccagccgagtcttagggcttctatgtggtctctccatgtttgctgccttgggattccttacagcataacggcttcagggcagtcaggcagcttatgtacctccagcctacagcatgaatattgcagcaaagcagaagctgcctcaccttttctgatttcgctttggaagtcacgtaacatgacttccaccacattctattaattacaagtgagtcatgagcctgctcaaattcaaggggaggggacacagaactcatcccttgatgggaaggatatcaaagtcacatggtaagaaaagcatgtggggccgggcgctgtggctcatgcctgtaatcccagcactttgggaggccaagacaagttaattgcttgaggtcaggagttcaagaccagcctgaccaatgtagggaaagcccgtctctactaaaaatacaaaaattaggccaggcgcggtggctcacgcctgtaatcccagcactttgggaggctgagacgggcggatcacgaggtcaggagttcgagaccagcctggccaacatggtgaaacccagtttctactaaagaaaaaatacaaaaattagccaggtgtagtggtgcacacctgtaatcccagctattcgggaggctgaggcaggagaatcacttaaacctgggaggcggaggttgcagtgagccgagatcacgccattgcactccagcctgggcaacagagtgaaactctgtctcaaaaaaaaaaaaaaaaaaaaaaattagctggccgtggtggtgggtgcctgtaatccccgcttttgggaggctgaggcaggagaattgcttgaacttgggagatggaggttgcagtgagctgagattgagccactgccctccagcctgggcaagactctgtctcaaaaaaaaaaaaaaaaaaaaaaaaagcttaaaaatctaaactctagagttttcagcaggcaggtttgccctaatcatttaggccactggagcattttataatctccatcttttatttatttatttattagtgacagggtcttcttgctccgttgctcaggctggggggcagacatgtgatcatagctcactggagtctcaaactgctgggctcaagccatcctcctgcctcagcctcccaaagtagctgagactacaggcacaagacaccatgcctagctaattttttttttttttttttttgagatggagtctcactctgtcgcccaggctggagggcagtagcgcaatctcggctcactgcaagctctgcctcccgggttcatgccattcttctgcctcagcctccagagtagctgggactacaggtgtgtgccaccacacccggctaattttgtttttgtatttttagtagagacgaggtttcactgtgttagccaggacggtctcgatctcctgacctcatgatccgcctgccttggcctcccaaagtgctgggcttacaggcgtgagccactgagcctggcccatgcctagctaattttaaatttttttttgtagagatggggtcttgctgtattgcccaggctggtctcaaactcctggcttcaaatgatcctcccgccttggcctccctaagtgttgggatgacaggtgtgagccactgtgcccggccaataatctccatctttttgcaggttccttgtttcagtggtgtttgtccctgctcaggggcttttctttttttgagatggagtctcactctattgcccaggctggagtgctgtggctcgatctcagctcactgcaacctccacatcctgggttcaagtgattctcctgcctcaacctcctaagtagctgggattacaggggcataccaccacgcctggctaatttttgtatttttagtggagatgaggtttcaccatgttggccaggctggtctcccaactctcgacctcaggtgatccacccacctcggtctcccaaagtgctgggattacaggtgcaagctaccacgcccggccatgcgggggcttttcactcagagattgtaagcaattgtagcgtccatgattggatccgtcaaccccttgaaaatgaactgaaaactctgggtgtgggtggggctcttctctggagacctgatccacaacttcccttcaaagggctccaggatacaaatgtcaaaagcccatctctggccaggtgtggtggctcatgcctgtaatcctggcactttgggaggccaagacgggtggatcacctgaggtcaggagttcaagaccatcctggccaacatggtgaaaccccatctctactaaaaatacaaaattagccaggtgtgatggcgtgtgcctgtaatcccagctactcgggaagctgaggcaggagaatcatttgaacccgggaggcagtgagccgagactgtgccattgtaccccagcctgggtgacagagcaaaactccgtctcaaacaaacaccgaaagcccatctctgaacacttttttctctttgtatctctggggaagccctaggggcaggtattggcctttgagggctatggagagcagagcaatggggcaggaaaggtggatggagatgcccacctgggcactttcctgtccgtaggacatgtcatccagtgacagtgactcggactgggatggaggcagccgtctttcaccatttctaccccacgaccacctcggcttggctgtcttctccatgctgtgttgtttctggcccgttggcatcgctgccttctgtctagcccagaaggtcagtctgtgtgtgggacttggaggggactgggcataaaagagaaaaatgcaccacaaaaacaaagagccatatacctgaggcgggaaggtggaaggtagcccagagaacctgaactcaaatcctgagtctgccactctctgcaagattttttttgagtctcactttgtcgcccaggctggagtgcagtggtacaatctcggctcactgcaatctctgcctcttgggttcaagtgattctcctgccccagcctcctgagtagctgggattagaggcgcgcgctaccatgcctggctaatttttgaatttttaataaagacggggtttcaccacgttggccacgctggtctcgaactcctgacctcaagtgatcctcccatcttggcctcccaaagtgctgggattacaggcgtgagccacggtgcccagctctctgcaagattttgggcaagtcacttaacttccctgtgcctcactttcctcatctgtaaagtgggaataattgctacctctgggtcaatgtgagaatcaaatgagttagaatagtggcatataccattttaatgtttttatttattttttaaaatttattattattattattttttaccattttaatgtttttattaaccactcagcatccccagtgcctgacctatagtaggtgctacgtatctgcttttggaatacatgcatgaatgaatgaatgggtatgttgggtgggggagggaccaggggaagggtctgggactgaggggatgcctgggtcactgctgcccactgcctctacagaccaacaaggcttgggccaagggggacatccagggggcaggggccgcctcccgccgtgccttcctgctgggggtcctcgccgtcgggctgggcgtgtgcacgtatgcggctgccctggtgaccctggctgcctaccttgcctcccgagacccgccctagttgcccctacagccctcactgtgaaccctgaggccggcagcccagcaaatctgtgggcagagagtggagaatcttggtggatgaggctgcggcggcggcaggagcatctagaaacgggagcgagctggactggaacccttccccttcctggccaccgctcttcgggcggcagcaacctgagattaaacaccagacacccttgcagccaaaccagagtctgttcgcgtgtgtgggaggatggaagggggtgggggtgcttgagaccaacaggggactgactggtcagggtgacgggctgtggtgggcatccccagggtgcttgctccctgagacctgagctggaaaagggggaagaggattttcgggttttttttgttttttgagagatggtctccctgttgcccatgctggagtgctgtggcacaatcatggctcactgcagccttgaactcctgggctcaagcaatcatcctgattgagcccaggagcctcccaagtagccgggactacgggcacctgccaccacacccagctaattaaaaaaatttttttgtaaagacaaggtatcactatattgcccaggctggtctgaaactcctgggctcaactgatcttcccgcctcggtctcccaaagagctgagattacaggcatgagcgaccatgcctggtggtttctaaacagcaggatgttctcatcccaatatgggtggttagcagagaactggagagagctgagtttcaagtccttactcctctacctgttagctgtgtaagcttggcccaagtgacttctcactttttctcctctgcaaaatgggactttctgcacacctcaggctgtagtgaggattaaatgcatcatatgtggaaatgactgtctgctgttgctgtctccctctgagcttttttttcttttcttttcttttttttgagataggatctccctctgtcaacccagactggagtgcagtggcccgatcttggttcactgcagcctcgaccttccaggctcaagtgatcctcccacctcagcctcccaaggagctgggaccacaggcgtgtgccacaatgcctggctaattttttgtatttttttttttttttttgagatggagtctcgctctgttgccaggctggagtgcaatggtgcaatctcaactcactgcagcctctgccttccaggttcaagagattctcctgcctcagcctcctgagtagctgggatttcaggtgcgcagcactgcgcctggctgatttttgtatttttagtagagacaggttttcaccatgttggtcaggttggtctcgaactcctgacgtcaggtgatccacccacctcagcctcccaaagtgctgggattacaggcgtgagccaccaagcctggtctttattgcttgataatgtctagcccctcttagtgtgcttagtgagcacttcctatgtgcctctgctaagtgcttgtgacagatgtgttttccctgtccaggtgccaacacctccatgtttccttaaggatgcatccctttccctattgcaggccatttggtttggatgggactgcctccaactgcaggtagggttttgccccatctctactaaaaatacaaaaattaggctgggcacagtggctcaagtctgtaattccagcactttgggtggccaaggcaggcgaatcacctgaggtcaggatttccagaccagcctggccaacatggtgaaaccgcatctctactaaaaatacaacaattaggccaggtgcggtggctcacgcctgtaatcccagcactttgggaggcagaggtgggcggatcacctgaggtcaggagttaagagaccagcctgaccaacatggagaaatcccgtctctactaaaaatacaaaaattagctgggtgtggtggcatgtgcctgtagtcccagctactcaggaggctgaggcaggagaatcattggaacccaggaggcggaggttgcatcaccccattgcactccagcctgggcaacagagcgagattccgtctcaaaacaaaagaaaacaaaacaaaacaaaacaaaacaagacagggactataacaacagccccatctcacagggttggtgggtgggtatttagagtttcctccccatggcctacaaggccccacctgcatgcttgcccgtttcccccagccccatctgctctcctgctctagctcgctggctttggccaccctgttcaccaagctggtccccagcccctgggggctccttccccacattatccaagagctcactccctttcctctttcagggtcccctctgaggtaccctgctctgtgaaggcactgatgcctgatgtactcaatttgccctccataaagggactctcccaaactcctgttccctgctttttactttttcatagatttactaccatctgacaaattccagtttacctccctgctcctctgggatctcactagcagggcctgcacacgatgggtgctcaacagacatttgttaaagtgaattaatttattgattcatccattccataaatgtgagctcctttgaatgttatccttgctggggggatctgtgcccccaggcctgggggctgtcacaggccaaggcctccccacaggagccctgtggttacagagctgcaggctcaaggagcccatgggtcagagaggcaaggctgggctgctggtttgcttcaggctgtagggggtgagtgggtggaggcaatgggagcggccccttgccccagcttgcctcagctcttggagtaacgcctctgcagcgattcccggtagaaacggaagacgtgttgcgaagcggcctgggccgcagccaggcactgctggagctgcgggggagagactggtcggtgctgggggccgagcccttcatgcacacacgacttggctgacccaggaggttctgctgaccccacctgactcccttaacctcccatcactcccctgcccccaagtgaggcaagtggtaagggattatttcccatttcatgaactgtttcttagagatcaggagaaataaaaagagggagaaggacttcaggatcagattctgacagcaacaggactcagacctatcaggcatcctcacaccttggaggaggccccagctgtgcagagctatggaactggagagtgcacagaattggagtggtcttgggattttacagccacagtccccttcagcccaaataatctaagagccatggaatcaagagactcccagtcttcactgccatgtattcctagattcatgaggtccaggttggacatgcttttgcagacagtcatgtccaagagtttccaggctctgccccttagcctgagacctggaattcccatggctcaccactctgagctgggagctgggggaccatcacatgccctcttctgacttcaaactgagctcatcctctttttgcctgtgttataaattgggcttcccttaaacatttccgcaaaggtttctgggtccacaaagtttgaaaactccctttttacaagaagaaatttaagaggctctcctgaagcctctcagaatccagggcagagttgggacaagaccgtatgtcagtgggaaggaaggttctggcttttcccctcatccccatgctggtacctcagtgtctgagtagagccccttggtgctggacatcagcagcttccgttccacgctgtccagggcaaaggtcaggactgcccgggcctcctagggacaaggggtagaaggcggtgggggacctaggaccttcccctcagataaaatctcagccagtcctttggccaggcacagtggctcatgaccataatctcaccactttgggaggccaaggcagggcactgcttgaggccagaaactcaagaccaatctgggcaacagagggagaccccatctcagaaaaaaaaaaaaaaaaaaggtagctgggtgtgggggtgcatgtctgagttcccagctactcaggaggcagaggtgggaggactgcttgagcccaggagtttgaagctgcagtgagctgtgatcgtactacactccagcatgggcgacagtgagaccctgtctcaacgctccccttcccaccacacacttgcagccagtcccactgaggggactccggacccttggcctccaggcctctccctttccatagccaggcgctcacctatcaagcatcaagcgcagccattttttgtctacgctaccccttccctacttccctgggtatagccctctgcctttcctttgtagaactgtactccatgccccttattccaaccacgtggttctgacaggggcttccaagctcagtattcctgccccaaggggctagccatagtgccactcacttatctggtacctctcggcctcccagtcccccttccatgctctgtcccacaggggctggaagccagcaagctgtatttcccagactcccttaccagctagtttccatcagtaatgaggtgggagaatggaagaaaagcagcaccctggtcctcatggacaatggcaggtgctgatggctgtggctgtgtgacagccatggaggtggggtgggttctggacctcagtggccagggcagaagcaggacatgctatgtgcatccagaaccaattgagatgatgtctccaacacgacagaacaggaggtggctcgcaggttcagtccaggtctgggaggggtttctcatctctgggtgtcactcctgcttcctttttcctcctctagttcctcaacactgttgttacaaagtccctgcatttaactccctccatctgaaaccctccaagtggtttccgtcttcttgactagaggggaccattatagcactgggcagaaaactcagaataacttgagcttaggacactgcacctgagccgatgaggaaaactctcttctcgtttgcttttgagcctcctaggatggaaatggagcttaaggggtcagtcccagcctcaggaaaggtgctggccagaaagaatgaagctgatgtgcagagaaaggcagggacgagaagtgaagcaaggacatcctgatggtgtttaaagtcctggttttattttattttatttttgagagtttcactctttcatccaggctggagtgaagtggtgcgatctcagctcactgtaacctccaccctccaggtttaagtgattctcctgcctcagcctcctgagtagctgagattacagatgtgtgccaccatgcctagctaacctttgtatttttagtagagacagggttttgcaatgttggccaggctggtcttcaactcccagcctcaggtgatctgcctgcctcagactcccaaagtgctggcattacaggtgtgagccaccacacctggccatacatttcctttctagtttatttatttatattttttgagatggagtttcactcttattgcccaggctggagtgcaatggcgcgatctcggctcaccacaacctccgcgtcctgggttcaagcgattctcctgcctcagcctcctgagtagctgggattacaggcgtgcgccaccacacctggctaattttgtatttttagtagagatggggtttctccatgttggtcagactgatctcgaactcccgacctcaggtgatccacccacctcagcctcccaaagtgctgggattacaggcgtgagccaccgctcccggccccacatttccttcctaattaagcaagtctgagctgggtttccagcacttgctgctaaatgaaccatgatgattagagcagcccttgctaagtgggattgaggtggcatgagccgactgtctgtagagaagcgaggcctggaggaagggacgggcagctgtctggcctctgcccttcagccaccctggtcttcacacctaccttttcttgcttggatgtaggatccagcacgagggtcccatcagagtccagggcgcaggcgaccccacagaagagagcccgcatgggcacacctgcatccaccaatgccatgcaggcggcattcagacaacaggccaggagctgagcaccacaggaaatggttaagtttcttttttttttttttggagatggagtttcgctcttgttgcccaggctggagtgcaatggtgtgatctcggctcactgcaacctccacctcctgggttcaagcaattctcctgcctcagcctcctgagtagctgggattacaggcacccaccaccacacccggctaatctttgtatttttagtagagatggggtttcactatgttggccaggctggtctgaaaactcctgacctcaggtgatccacctgcctcggcctcccaaagtgctgggattacaggcatgagccaccacgcccagcctaagaagtttctactgtaggcctggccagcagagcagatccatgcctccctccaccaggctgatgcctatggcagacatcactaatcggtcacagaagggcagtatggcagagtggttaaaagtggtccggggatcaagtagccctgggttccagacctagttttgctcagctgtgtgaccttgaacaagtgacttactccttgagtctcaatctcctcatctgttagatggggaatataataatattcaataggtatgtactgaagtacgtaccacacatttgttggcaaatagggtcagagaggggaagaaaccttccaaagacacgagggggaggcactggcaaagccaggcccgaaacttgggtagcagccactccccggtgacagagctggcagggcaatggaggaagagccacctcgctgctgcctgcaggaagctcacagtggaaagagagcacaggttgggagtcagctggctctgcctcagtttcctaatgtgtttcttctccaggcctagcagccagacaaagaccacagctttagtcaaccggttccagctctgctgctgatcctccacgccttcctctgggcttcactttccacttctgtaaaatggggtcacaataccttctctctctgcccatccataaaatgtctgtccagttcagggccacgttccagtaaagccttctacagtgtctaattctagtcctcaacctcaacctctcgcacctcagacatggagatcttacaaggccacgctcctgactcagctgctgtctgctcagggcgcccccagcactgagggcctgaaatccactgaggtgccgagtagaagtgattgccagccgggcacagtagctcatgcctgtaaccccagcactttgggaggccaaggtggactgatcactcgaggtcaggagttcgagaccagcctggccaacacagcaaaaccccgtctctactaaaaatacaaaaattagcctggcgtggtggcaggcacctgtaattccacctgtaattcaggaggctaaagcatgggaatcgcttgagcccgggaggtagaggttgcagtaagctgacattgcaccactgcatccagcctgggtgacagagtgagagcctgtctcaaaaacaaacaaaaaaacccaaaaaacaaaagaagtgattggcacaggctctggagtcagactggcctgggcttgagtcctgcctgtgctgccttccagctgtgtgaccttgggcaagccccttcccctctctgggcctcagttttgtcacctgaaacatgcgaacataagaacactcatctgccagggtccgtgggctctagaactagacggtctgggtctaagtcttggctctgccacttccacggggatcataagggcatgtgctatattacatgagttaatgtgcataaggcacacagaacagtgcctggcacataagtaagcacccaggctgtttgctctccttcttcagtgagctggtacctgtcaagtgtttgaaggctttctggctagcagtgagggtatatgtatccgccaggagggaagcaatcaggagacttcctggaggaggaggcctggcagaaaggatacagagccggcatcgctgacaacctgcagcaccacggtgatggaggtgcgggggtgcaacgtgcccagcaccaccgcctcgcacgtgttcctgatcagccgctcccggctcttctctgcaacacctggggaaattgaagagaggttcagggtcttccccttcatttgactcaccttcctccatacgcctcacccaaattcccagaaagggctcacggtctcagcctgggatggtgcagttacctgcagggatgatggaagattccagtgggaagaaggcaaggcctgactgccatccactgacccctgctacctccagcatccaccaagggaaccatccaagggaagaagacctgggagttccatgtctgtgctgctacccacgcccactcccaccctagcaggtccagtcagtggggactgagggatatgagggtaaaagggtggaaaaacaggttaatggtccaggcacagtggctcgcgcctgtaatcccaacactttggggggctgaggcgggcggatcacttgaggtcaggagatcaagaccatcctggccaacatggtgaaaccccatctctactaaaaaaatacaaaaaattagtgggcatggtggcacgtgcctgtaatcccagcgactcgggaggctgagccaggggaattgcttgaatctgggaggcagaggttgcagtgagctgagatcgtgccactgcactccagccggggtgacagagcgagacactgtctccaaaaaaaaaataaataaataaaaataaataaaagaaaaacaggttaatggaatgaatgagagtggaggcagagagagggagaaaagagggagggagaaattagaggcagagagagaagcaacagaagatgagttattaattagaggcggagagttaaagacagaaacagctgagtggagacccaagcggggagtggagactcggggcagctggtagggaggagctgggggggtgattttgacaaactgggcaccactcagaggttcagcagggcccaattaccaggcagcccaatcttcggcctcaggatcacttcgagtgtggccttgttgaaaatctctttgctgaccttcacctcggccggcccgtacacacccgccaggacagaggtgtcacctgaggagacagcagggagggcctcactcacagcttccctgctcctggggccccatttgtggcactgagcctgacggccagggctccccacgtcacccccgccatttgttggtactgattctttgagcactcacttcatttctctcatttgtaaaatggggaaaatagcagtccctccccgctagcgtcttgtgaggatcaaaggacacaattcacagaaaacacttagaacactgcggggctcacgctgaatgtgcaacagactttagctgtattagtaacattcgtccattcaggcattcaggcagggtctcactctcattgcccaggctggagtgcagtggtgccatcacggctcattgcagccttgaccttctgggctcaagtgatcctcccgcctcagcctcccaagtagctggaactacaggcatgtgccaccatgcctgactaatttttatatttttagtagagaggggattttgccatgttgctcaggcgggtttcgaactcctgggcaactgtaatcccaaggtgctaggattacaggcgtgagctaccacgcctggccctgatattagtaatttttttttttttaatgagatggagtcttgctctgtcgcccaggctggagtgcagtggcgtaatctcggctcaccgcaacctctgcctcccgggttcaagcagttctcctgcctcagcctactgagtagctgggattacaggcgcgcgccaccacacctggctaatttttttatttttagtagagactgggtttcaccatgttggtcaggctggtctcgaacttcctgacctcatgatctgcccgcctcccaaagcgctgggattacaggcgtgagccactgtgcccggctggtattagtaacttttaacaggaagttcttcctgaaagctaaccatcctccctcttactgcagctgctctcaacttctctttccaaagcttccccagcccagctcttcccttaggcactggcccccaaattttgcatcagtctggacacctgagaaagggataatatctggaatgaatcctgattccttatttccccagaagctatgaacggggtacaggaggtaaaacctaagaaataaacagcctggcttctagtactgtctgctgtaatcccagcactttgggaggctgaggtgggtggatcacctgaggtcaggagtttgagaccatcctagtcaacatggtgaaaccctatctctactaaagatacaaaaattagctgggcatagtggtgggtgcctgtaatctcagctacttgggaggccgacgcaggagaattgctggaaccggggaggcggaggttgcagtgagccgagatcacaccattgcactccagcctggacaataacagcaaggcttagtctcaataaaaaaaaaaaaatacattttaggccaggcatggtggctcacacctgtaatcccagcactatggaggcccaggtgggaggactgcttgaggccaggagtttgagaccagcctgagcagcataggaagactcctgtctctattttcttttttgggacagagtttccctctgtcacccaggaggctggagtgcagtggcgcaatctcagttcactgcaacctccgcctcccaggctcaagtgattcttgtacctcaacctccagagtagctgagattacaggtgcgtgctaccacatccgactaatttttgtatttttagtagagatgggttttcaccatgttggccaatctggtctcagaactcctgacctcaaccaagcgaggtggctcacgcctgtaatcccagcactgtgggaggctgaggcaggtggatcacagggtcaggagttcaagatcagcctggccaacatggtgaaaccccgtctctactaaaaaccacaaaaattagccgggcgcggtggcacgcacctgtggtcccagctactcaggaggctgaggcagaagaattgcttgaacccgggaggtggagggtgcagtgagccacgatcacttcactgcactccagcctgggcgacagggcgagactccatctcaaaaaaaaaaaaagaaaaaaaaaaaaagaactcctgacctcagaggcctcccaaagtgctgggattaccgctgtgagcaactgcacccggcctcttcttaattcttacgttcgaagaaactttaggtatctcaattcagcataagcgctaagcctgagggagggcctgggaaggtccttggttaaggccgtatttcctgggaagcccaatttgcccttacacggaaggtatgcttagttccaggagaaactgccctgaggactggagaagttaccaaaacagaacttgcctctggctccagatgaactgcctgtgttttgcccgagcacaagagtctctcccctctcaccttcttgaagacgtggctccagcaattctctcccctgttgaccccacaacaatctacaactcctgccccacttatctgatcctcttacagcagaactcctgaacagctgcctcttcttccttttctgtgaccccaccactccattgcggcagctcaacatcgtcaccactgacctccaaatgatcaaccctcccatgacccggctgtcagtaaggctgaaacagctggtcagccctcacatctcagacatgctcttttcttggccccaggtcaccaccatctcctggtttccccctaactctctgggcgttccttctgagtctcctttgctagcttgtcacatgtctctgactgctcaagttggaaggcctagggcttggtcctgggacctcttctcttttccatctacactcacttcgttcaggcaatagcctgaaataccatctatatagccagagagttccaaattgcctatgtccagcttgggtctctcttctgatttccagacttgtacagatctgggcagaaaccttagttatgcctgaatctttttcctcgcactcaaaccaaactatacgtaagttttgtccgtattactttcaaactacatccagaatctcatcacctccactactcctgctctggctggagccaccatcacctccctgttttcccccatactccccacaatcaacacagcagccaaattttgttaaaatgtattggggctgggcgtggtggctcatacctgtatgagcactttgggaggaggattgcttgagcccaggagttcaagaccaacctgggtgacatcgtgagacgctgtctcaattttttttttttttgagacagagtcttgctttgtcgctcacgctggagtacaatggcacgatctcggcccactgcaacttctgcctcccaggttcaagtgattgtcctgcctcagcctcccgagtagctgggattacaggcgcccgccaccatgcctggctagtttttgtatttttagtagagacagggtttcgccatgttggccaggctggtctcgaactcctgacctcaggtgagccacaggtcttggcctcccaaagtgtggggattacaggcgtgagccaccgcccccggcctcccgtctcaaacgttaaagagaaatattcttggagttaatctacttctgagagttatttagctaggaaaaggggatatttgctctataggtaagacttgccctaatcttttttttttttttttttttgacttgccctaatcttagggatatttacttgtgtggagagatgcagtgaggtagcggtggggatgtatttctcaacccagcgcaatgacattatcttcaatttgaggagtatttacgtgggtgaaagatccgccacagtccacagtatgcaaatagacaggtttgcttcagtccgggatgcaaggacctagagggtgtgtgtgtggggggtgggggtgggagggtggaggaggaatcgagttaagggggatatttaccctggcgaggtgattttccctattctgaaatatcaattcttgggcggacagtctgcccctcctctcattctcagagatagttacaaagatggaactatcttctcctttctagtcgtgagggagagatgtgtgtatccctgcgtatttagtagtattcaatcggacaagaaatcatgcatcaacgcaggagtgacatttaccagctggtatcgtgaggaggtgggcactcggttgcacagtacacggtagtccctctccaaaagaaagacctgggtgaagttcttaccttgcaggaaggaagcagagccatctggccgcgacagcaggttctgttcgcaggcaaagtgccggaggctgcagccaggaccccgagggctggaccctgttccattttcagcacggattttggcgtcagtatgcgtctcctcctccatcgcgccgagcccacgtgcggctgcagttgtcacttccgcctggcagcgcgcgccgcaaacaggctgcgtaaccagtgcgcacgcgccgggctgggccatcctcctgggcgtccgcacgtggcttagcgtttaccaacaatctggctccgcccagtcccacctcctaactctggcaacgccattggacatttgggaacagaaggcaggccttggcattgatccgctttactctgggcccccgggccctaaatccctgaggccctggtcaggttgccctcttctttgcctgttacaggagtaactacaatgaggcgattggagaaaattttgggtagatagatttttttttctccaaatctctgtgcattctatctaccacagaacgggaagaagatggttttcttgtcagatggtgctggagtttgcgtcaggcacataaagaggcagccccgaatctagcctacgtgagtgccggaccgctgagtggttgttagccaagatggcggtagcgatcgctgcagcgagggtctggcggctaaaccgtggtttgagccaggctgccctcctgctgctgcggcagcctggggctcggggactggctagatctgtgagtacctgggccccaggcggttttcccaaaggggattagggatgtaaaggctatcttcagagtgtggggtccctgaaggatatgaaggaagggctgtcacaaaagggaaaaagagtgggagactccttggagaagacaccgaagggaagatctgccacttccttaggagacgaaaagaacttccacttctttaggagaggaaaaaacccgtttgcaacttctttgtgggccctgagggagacgacttgaagagagagatgggggttccttattagctgccactggtattcaggggaggctccttggaggaacaggggaagaccgcaagaccttctccctcagggtttggagaatgaaactgactttgtaagggagggactttcttctgggcaaagatccctcttcaagaagaagaaagaagagaacaggtccctgtcacaggctgcatagggccttgtatttctttgctcctttgccacaattctgattttaaaatgaattgtgtaaaaaatttgtttgattcctgtgtctcttgatcgaatatcaagacagagaattcgtgtgttctggacactgtacagaggagacgattaatatttgttgaattaatgaggggaaaaaaggagggagagaggtacagacagggcactttgcccacatttcttagaaacacttgagaaggctttgtttcttgtcaaaagggtcacaatcccttcaggtggatgctgctaagggcaagattacactgcaaaaaacctaggtggaagcctatctttagacggggagaggcaatgggttgcagaagagctttgaactacagttgacagataggagagtagtggttacatgggtggatgcatgtccttgctctgccgctttccacttgtgtagccttggccaacggactgcacttctctggatctatggagctaattttcctctctaaaatattaacagtggccacctcatagggctgtgaaaaatcaatatgtaaaatgctaaggactggacctggcacatcctaagggcaataggaatgttgatagtgagggtggagggaagggacagaaactaaccttggagatggggagaagaaaggggtgaccttgggaaggcctggattggtgaggccctggggaaaaaaatctgaaaagatattgtgaggttgagtctgatcctctgatccccaatccataaggaggggaagatggaatctgtagaaagaagctctgggtaggggaacaaacgggaggagggtgaagaagatgggccaggagtaggacgtagtaggtatctaggaacggagtcacttgaaacaggtaaatacagaagggctgcaggagcaaggtgtgggtagggcagtctcttgcctttgggctggagaccttttcacttttttttttttttttttttttgagcagttcatatcctccacagctgatctcagtcccaggggcccattggctgggcaagtggggcaggaggtgggcaggactggggcaggctagggaaaggtcatttatggctgattaaatctttctctcctgtctcaatctcttgattacctttcctcttgcttcccctacttcatttttggtggggagtggggagggaagaagtccctactttttatttatatatatttaaatttgtattatcttaagagttattgttttttcccctttatttctcccacctgttctttctctcttcttctttctttcctctccttctcctctcctctcctcccctctcctttttcttttcttttctttttccctttcctttcctttccttttctcttctcttttctctctctctttctttctgtacctctctttcctttttctttttttttcttttttgagacagagtttcactctctcgcctaggctggagtgcagcagcatgatcttgacttactgcaatctctgcctgccgagttcaagcaattctcctgcctcagcctccctagtagctgggattacaggcatgcactatcacgcctggctaatttttgtatttttggtagggacgaggtttcaccatgttgtccaggctggtctcgaacttctggcctcaagttccgcctgtcttggcctccaaaagcatgagccactgcgcctagccttttctttttttgagacaaggtctcactctgtcacccaggctggagtgagtgcagtggtgtgatcatggctcactgcagcctcaacctcctgggctcaagcaatccccccacctccacctcctaagtagctgggaccacaggcacgtgctactacgcctggctaatttttaatttttttttttttttttgagacggagtcttgctctgtcacccaagctggagtgcagtggcacgatctcggctcactgcaacctccacttcccaggttcaagtgattctcctgcctcagcctcccaaatagctgggactactggcgtgcgccaccatacccagttaatttttgtatttttagtagagatggggtttcaccatgttgaccaggctggtcttgaactcctgatctaaggtgatctgcccgcctcggcctcccaaagtgctgggattacaggcataagccactgtgcctggctgcgcctggctaatttttaaatctttgtagagatggggttttgccatgttttccaggctggtcttgaactcctggactcaagcgatcttcctgcctcagcctcccaaagtgcaggatgacaagcgtgagccaccttgcctggccatattattaaattatcatgagtttaagtttaagtagccacaagtgggctgggtgcggtggctcatgcctgtaatcccagcattttgagaggccaaggtgggcgggttgcctgaggccaggagttcaagaccagcctggccaacatggtgaaaccccatctctactaaaaatacaaaaaaattagctgggcgtaatggcgtgtgcctgtagtcccagctacttgggaggctgaggcagaagaatcgcttgaacctgggaggcggagattgcagtgagccgagatcgcaccactataccccagcctaggtgacagagcagccctctgtctcaaaataagatagccacaagtggttggtggctgccacattagatggtgcagggtttttgttttgttttgttttttgttttttcgaggtggagttttgctctcattgcctaggctggagtgcaatggcatgatcttggctcaccacaacctcctcttcctgggttcaagcgattctcctgcctcagcctcccgagtagctgggattacaggcatgcaccaccatgcctggctaattttgtatttttagtagagacagggtttctccatgttgatcaggctggtcttgaactcccgacctcaggcgacccacccacctcggcctcccagagtgctgggattacaggtgtgagccaccatgcctggctaagatgatgcagttttatccaggtggagatgaagaaatagtcagggaaaggttgagaggctgcatattgtagacagattggattactgggttcactggggaagattggattagaaggaggagtggggctgctttacttgtccccgacttcttgcccctgctctgcccactccttcattgaataccctgctgccctgcagatgtgtttgcctgattttcacctcccttcctgtctctgttatcatagcagacgttttagtgctcagggaaaggaggaggaaggaaactcagattgtcaaggaattgtgagtcagtttctcagccactaccccaggcctgggcttggctaagtcatttcacctctctgaccctagctagtggggtgaatagagtccctaccctgttggaagtcaggaagcccctggagctcgctctgtgctaattatcggtgactatttctgtgacccagctcttcaggggcagcctgtctgggggttccagtgccctgtgcagtatctccaagtggtaggtactcagtgtatgtattagtccgttttcaggctgctaataaaaacacacccaagactgggtaatttataaagaaaaagaggcttaatggactcacagttccacatggctggggaagcctcacaaacatggcggaaggcaaatgaggagcaaagtcacatcttacatggtggcaggcagacagagtgcttgcaggggaactcccctttataaaaccatcagatctcgtgagacttattcagtataatgagaacagcacgtgaaagatccacccccataattcaattacctcccactggctccttcccacaacatgtgggaattatgggagctataattcaagatgagatttgagtggggacagagacaaaccatgtcagtgtgtattgtgggatgaatggagatggtcattacagtcttctaagtgtatgggtccatctcttacttgctagtgtgttaagaaacctggcctcctttttcacatcttgaggcactgaatggtttacaaatccaactctaattttttattatatttaatacaccaatagtgcaaggcctttattggtagtactctcctattacagatggagagactgaggctcagagaggtgaggtctgaacttggagctctggactccaaaacccagtttcttttcatggtaccaggctgccaggaggagaaaggatggagcttagattcaagtcttgcaacattcttcttagtccagtattggcttattttgttttatatttttttgagacggagtcttgctctgttacccaggctggagtgcagtggcgtgatttctgctcactgcaacctctgcctcctgggttaagcgattgtcctgcctccccctctcgagtagctgggactacaggtgtgtgccaccgtgtccggctaatttttatatttttaatagagacagggttttgccatgttggccaggctggtctcgaactcctggcctcaactgatccacccacctcagcctcccaaagtgctggggttacaggcgtgagccaccatgtgtggccgggcaggtgatttttcttgtctttcgcctctttccacttcagtccccctggccatctttcccttccttgaatgtgcctcctcccacctggtggcctttgtaggtatgaggtccttcagatgatggctgacatgacacttcctcagagaagcgttccagaccccaaacaccaggtctctgtctgtgaaacagggacagtgatacctgcctaatctgcacgcctttcccttctcacgagatattctgggaagggggactcaactctttgctctgtttgagggcagagtgcctttgagctcaggagagagtgggtttgggtggccttagctaccctagatacggaggacttggagttaactggcaccatccacaaagccttgcatgcactggacctgaacaagttgcttagcccttgaggcggcgcctcagctaccacctgtctttgatggagttatgataacagtgcctgccccgtctggatgccttatgggttcagtgagcacataggtgtaaataaagtgctttgagtggcacctcagcatgtagttattctctgattgacctatagcagccatgccagtcttcagggtcccagggcgccaggctttcttctcttgccttggagccttggtttttccctaggactgaagtgttctgaccccttggctgaactcccccttctttaggaagctttccctggtgtgccatctgatgctggtgcttcctggaggggtactatctgatcctagctggtgaggcattcctgccagagctgcggcaggtgctttccccgcctctccaccagcctgtgaggtggatgccatccccacgagggcacgcaggttcacagagactggctcctgtccaaggccgcgtggctggaaagagacagaaccagattcaaacaccagcagtttaaccctagagaccctcatcctacctcctatgtgggtaaccactatacatcctgcctcctctgaaatctcccgtttttttttattttaaaattttatgtgagtatttacttatttatttgctgctgttgttattgttttgagacagagtcttgctctgttttcacccaggctggagtgcagtggtgcgatcttggctcactgcaacctctgcctcctcggctcaagcgattctcgtgcctcagtctcccgagtagctgggactacagacatgcaccaccatgcctggctaatttttgtgtctttagtagagatggggtttcgccatattggccaggctggtcttgaactcctggcttcgagtgaactgcctgccctggcctcccaaagtattgagattataagcataagccactgtgcccggccaaaattttatttatttatttatttttttgagatgtagtcttgctctgtcacccaggctggagtgcagtggcacaatctcggctcactgcaagctctgcctcccaggttgacgccattctcctgcctcagcctcccgagtagctgggactacaggcgcccgccaccacgcccggctaattttttgtatttttagtagagatagggtttcaccttattagccaggatggtctcgatctcccgacctcatgatccgcccgcctcggtctcccaaagtgctgggattacaggcgtgagccaccacgcccagcctaattttatttattaatttatttgagatggagtctcactctgtcacccaggctggagtgcagtggtgcgatcttggctcactgcaacctccacctcccaggttcaagcgattctcctgcctcagcctcctgagtagctgggactataggtgcgtgccaccacgcctggctaatttttgtatttttagtagagatggggtttcaccatcgtgatcagcctgacaggctggtcatgaactcctgaccttaagtgattcacctgcctcagcctcccaaatctgctgggattacaggcatgagccaccgcacccagccatattatttctgtattttcatttggcttacctgtcaacttgacacttttttgtttttttaggctagtcaggtgaagcaatgtgagtaagatcacctgtcttgattataacttgtgtgttcagtgtttgtcattcatccctccctgtctctagccttcagttcagggcatgatttggagcaaatgttcagtatctgtttaacaagaacaatcatgagaaatacttactcactacttgtgtttatgaaacattatgtgccaggcactgggctgagcaatccacacaggtcaactcggttaatcctcatgacaacccctgagataagtacttataccaccctcggtgtacacaggaggaaactgaggctcagggagtttttctttaaaaattttttcttttttttttccttgagacaggtcttactttgtcacccaggctggagtgcagtggtgtgatcttggctcactgcagcctcttgggctccagcgatcctcccacctcagcccctcaagtagttggggagtacaggtgtgcaccaccatgcccagctaattttttgtagggatggggtcttgccatgttatccaggctggtcttgaactcctgggctcaagcgatcctccctccttggcctcccaaagtgctggtattacaagtgtgaaccaccacacctggccttaaattttatttatatatttatttttgtagagacgaggtctcactatgtttcccaggctggcctcgaactcctggactcaagtgatcctcttgcctcagcctccagagtagctagaattacaggcgtctgccactgcacttggctcagggagtttaagtcacataatcaggcagcggtctgctcagttagagtccatgcgcttagccatggtgccttcaagtgactccaccagggtcaccccagtacttcctgggcagaccagaccatccagagcgggcaggttgtgctttcctgcatggtgggagaggacgtggcatgaagctttgtgtaaatctgtgcagcctctgccattgtaaatcactggccaccgggacagactcccccacccccttccaaaaactagaggaacagatgggtggagtcgcatccttcctctgcaggcatttggccacccactcccattatggagcatttcctcaggaccaggcacagcgtggagccctttgcatagctcactgaattggggcagcaaccctggggctggggactaccattatctccaccagcccagcaaagaggggaggagggtacagccgagacccagctgcagtatgtggagcacactggggtgccgtgaagatagctgtccagcctctagaggctgacagtcctgccctgacacagtggtttgttctcagactctggcctcccctcttagtgcccgtctgaagacttcagccttcggtcctcttccatcagcatgccgtctcccctgtgcctcagtctccctctctggagtatctgctggggccacagtttggttttattgttctttgagacagggtatcactttgttgcccaggctggagtgcaatggtgcagtcatggctcactgcagccttgacctcctgggctcaagccatcctctcacctcagcctcccgcaactccagtatctggactacatgtaaatgccaccattcccagctaatttttttttttttttttagatagagtctcactcttgtcacccaggctggagtgcaatggtgccatcttggctcactgcaacatccgcctcccaggttcaagccattctcctgcctcagcctcccaagtagctgggattacaggcacctaccatcatgcacggctgttttttgtatttttagtagagacagggtttcactatgttggccaggctggtcttgaactcctgacctcaggtgatctgcctgcctcggactcccaaagtgctgggattacaggcgtgagccaccacgcccagccttcctggctaatttaaaaatttttcagagacgagggttttgcctaggctggactcactatgttgcctaggctgatctcgaaccactggccttaagtgatcctcccacctcagcctcccaaagtactgggattacaggcatgagccgctgcacatcgccacagtttgattttagtatccactttaaggtgcagttagttcttcccagctcctcttttccctatctcatacagtgtagtcacttccctttctcccacttctcaccttcctagattttgtttttctctctcttaccaagttttgagtatgtaatacgtcccagatcggtgctgaacccctggtgtgagttaacttagcaacttttcacgtggtgttctgcagccttcttacagataaggaaattcagagaggtgaagtgtttttgcagagagccacacaatgagctaagaaattagaacccagggcagttgaactccagagccagggaacttaacagcccattcatgcattcactcaggaattccctcttgagtgcctgctgtgaaggcaacctggacgctgtctctgccttcctgggattgtggtgtgtgtgggagacagacacgaaacaaagcaatcttctaggtcagtgtctggctatgctgggtactcagaagggggaagcactgtgctgcaagaggccggctgtttcctcctcacaaggggaggcctgcagtgacattgccaggcctgaatctgccctgccattgggagtgtaatttcctcacgactacaaatgcaaataaatacacacactgaacatgctaccccgctagaactgtggacagcttgttcactgcagttaaaggaagacggagggacacatttgagcacgcatgtgtgagatccagcttgtggcaaaccctgccattctttaacatctgtgggaagtgaagccaccattactgacctcggaggaatcccgggagtagtgggaagaaaagttgcagatgtttgaaaatcaggctgcaggggcagttggggtgaggagcatggatgtctaggagcctgaatctcagcgttggaagcccagttctgatgtaatttttttttttttttttttttttgagacagggtctcactttgtcccccaggctggagtgcagtggcacagtctcagctcactacagcctcatccttccaggttcaagcagtcctcctgcctcagcctcccaagtagctgggaccacaggcatgtgtcaccatgcctttctaatgtttgtatttttttgtggagacagggtttctcactgttgcccaggctggtctcaaactcctgagctcatgtgatcctcctgccttggccttccaaagtgctaggattacaggcgtaagccactgcccagcatccccacctttttttttttttttttaaatttgtggtttggtgcaggttattttacctccccaggcctcggtttcctcatctactcaagggcaatggcagataatcaacctcacaaattccccgaggagttagtaggcttgtgcctgccaggctcagctggcttacagcaggtgcttcataagggggagctattgcaacgcctcggctggttctaggctgcctagctccagagctaagagtcccagtgggttcatatccctttgagcatttataggcttctcacaggtctcctgggctttctcagccattcctcatctgacctgaggaggtgtgatgtccttgcaggactcctccagcccctctgagcttttttttttgtttgagacagcatgttgctctgttgcccaggctggagtgcagtggtgtgatcatggcttactgcagcctccacctcctggggtcaagcgattctcccacctcagccttccaagtagctgggactataggtgtatgttaccatgcttgagtaatttttaaaattttttgtagagatgtgatctcaggctggtcttgaactcctgggctcacctgggctcaagtaatccttgagcccaaagtgttgggattacagatatgagccaccttgccaggccctgagctccttctgtcttccatgaaggacacactattccttgccttttgtctttttttgtgtgtgtggcagggtctctgttgcccaggctgggatgtgttggtgcaatctgggcttattgcaacctccgcttcccggattcaagtgattctcctgcctcagcctcttgagtagctgggattacaggtgtgcgcaaccacgcccagctaatttttgtatttttggtagacatggggtttcaccatgttggccaggctggtctcagcctcccgaagtgttgggattacaggcataagccactgtgcctggccactttttgtcttttgcatgttctatacaccttgccgagaatgtgctttccctgcctcctggttatccctcaggtttcagctctaacatcacttccccagggaagccttaccctcgctttcttctgctataggataatatgaaccaccatcattgttacttgtttagtgtctgccctccctgctaggcagcaaggacagatatcttgcctgtcttaggtccccagaacccagcacagggcttggaacatgtcaggtgctcaaatatttgttgaatgagtcagtctgggctcgcagagggagctgggaccagagtagagtggacactgaagcgtatgtagcagtttgccaggcgatagggaaagagaccttcttgtaaagcaagcagagatgagagggagaaatgagaattgctaagattgttttgagcatttgttaggtggcttacagatgctttgctgaacattttattcatgtgatcttgtttaagcctctcatttccatgaggggttctccatttttatagacaaggaaggggacacgtggagaggggaagttactttgccatatcaccctctaagggatttttttttttttttttttttttgagatggagtctcactgtcaccaggctagagtgctatggcgcaatctcggctcactgcaacccccacctcccgggttcaagtgattctcttgcctcagcctcctgagtagctgggactacaggcatgtgccaccacatccggctaatttttctatttttagtgggtacagggtttcgccatgttggccacattgatctcgaactcctgacctcaagtgagattcgcctgcctctgcctcctaaaggcagtaagggaattgaacctaggcagtctgactcttaagagctcaaagacttaagctctgtcctgagtagcttcgctggtgtatggtatagggatcagaagagagctggtctgtatgcctagagggcatcctgcagtgggcatgtgtgtctgtggtcacagtgggagagagagaggagggggcatctgtggccagaatggggaggcctcgaatgccaggatgaagagtttgggcctatggtaatgagaatagtaatagctaccagttattgacttgccagccacttgattgagtcatttaacctcacaacagtcctatgggataggtgttaactgttttcatcccagtttttcagatggggaaactgagacacagaagttgtagtcagttatccaaagtgtcgcagtgagaaagtgctggagttggggctcagaccctgtgagtcaggccccagagttcactggggccacatgctcaaccaccatgccgcctgcctgccgccggggctgagccagcggaaacctgggtgctgcttctgatgcaggtggtctcctctgctctcttccccagcacccccccaggcagcagcagcagttttcatctctggatgacaagccccagttcccaggggcctcggcggagtttatagataagttggaattcatccagcccaacgtcatctctggaatccccatctaccgcgtcatggaccggcaaggccagatcatcaaccccagcgaggacccccacgtgagaggcggcctcccccacttcccgtgccccccacgcccaggccccttgcctgtctcctctctggtcccaactgccccacgtctatctgtgcctccacccgcagctgccgaaggagaaggtgctgaagctctacaagagcatgacactgcttaacaccatggaccgcatcctctatgagtctcagcggcaggtgcgtggggacaggactaggggcggggggctggaattacctgaggtcccctacctgtgtttgggccaaaggaatggctcccaaggaggacagattcttttttgggggggttccatagagttctgagggttctcttgggactctggaggagaagtgtgagagcagtcctgccttagggcagaaggatggacctgatcactaaaaaacacctactgtgtgcctggctgggggctcgcctgtgtggggagagggcagggagaaggcctgacagcccttcctcttggaaatgcacagtcctgagaaacagggtgggtccccagtgcttcctggagtgctccaggggaccgccctaggcccatgtgaaatgggctgtgatcccctgataaatcctagtatcagggacaaggatccagtcaagccagtgtcaacaaagagggaagttattgactccaatgaccatacatccagagggtcctgttttggggcacagctagatccagggggtcttccaggcaggaagtagagggaaggcggaaggccagacatggcacatcccagctatcccacacccccacctttatagagctttctgggtagtcccacctagtgacatctgcatacatttcctgggccactcctagctgcaggggagactgagaaatgtattaataatactttagtcccggcagttgctgcctgcgggagattgagacctctgttaacagaggaggggaatagtatactgggaaggcaaccaggagcctctgccagtagccccgagtcctgatcctcagggggctggttgcaggctcttacccacgctaacctggacagtcctgccaggccctcagtactcagcaccgcccactcacttggcactggaatgtgcattaacttttaattggctccccacttagaagaaagcacacattcatcagtttcccccacagcaacgggaaagccaggcctgggaacacatggaggagggcaccgccgagccgcgaggagctctggccccggggtgtccctcagggtgctggccaggctgcctttgttccgctttacacatggccctgtgtgatctcatgtccatccgtatgccagggctgcccagagccccagccagactgcttgtcagagccctgcttggcttctcgccctggatgtcccacagcaaactaatcctgtctgaacttgacctcgacatcttcctcccaggcgtgctcctttgcctcacctagtccgtttctcagtgaagagcaccaccatccacctgcttgcccacaccagaaacctcatctcatccctgtctcctccctcccccttgctatccctttctcccctctcattccctctgtctgtagatatttcttttttttttttttttttacttttgagatggagttttgctcttgttgcccaggctggagtgcaatggcacgatcttggctcaccgcctccctggttcaagcgattctcctgcctcagcctcccgagtagctgggattacaggcatgcgccaccacacctggctaattttgtatttttagtagagatggggtttctccatgttggtcagtctggtctcgaactccctacctcaggtgatctgcctgccttggcctcccaaaatggtaggattataggtgtgagccactgcacccagctgtagctacttcttttcttttatgttatttttatttatttatttagagacggagtccacctctgtcgcccaggctggagtgcagtggcgcaatctcggctcactgcaacctccgcctcccaggttcaagtgattctcctgccttagccccccaagtagctgggattacaggcgcccaccaccacactcggctaatttttgtatttttagtagagatggggtttcaccacattggccaggctagtctggaactcctgacctcaagtgatccgcctgccttggcctcccaaagtaccgggattacaggtgtgagccaccgtgcctagcctgtctgtagatacatctttaggaagtgctcagctgctcagcagcacactctgagacccagccccatcctttctctgcttcactgttgttggtgagttgaccttcgtgctctgcttgtggcctcgtgttcacagcatggctgctgcatgtccaagcttcatggctgtctgcaaggcaggaagaagtagggagtgggtagggctggcaccagcagcagtggtctcttctatccagaaagcaaaagcagacttccaccaaaatatctggctaaaactgtgtcccatggccacctctggctgcaagggaggccagggacctgagtgcgtgtctttttgaggctcaggttaggggatttgggagaagggaactgggcactggtgtggccagctgacagggtctgctgccccctagcacagccgactcagcttcctcagacacatccacctgctcctctcccgcctccctctgctaccaagctgggcctctgccccctctctcctggcttgctgcaatcagccttgatgactccatccatttacctcactgcagcctgagagcaattctaaaacacaggtctgaccacattgctcccttgagaagactgtcggcaggttaccactattctcagagtaaaatcaatgtatcgttccctttgttatctgggtgccatctcctctccctcctcatctttccccacccctaccactgtatgtcccagcccttctggcctcatggtctatcattccctctgcctggaaccctccacccaccccatctttgcgcactggtcctcaccgatgcccttccgtggtggaacaggtgcttcctttgggcttctatcacagcaactcgatccctctggcagttctaagcagtctggcagcgtcttcttaaaggcaggaaccccagcatggcctggcccaggactggccttcaggaggactgtgaattcatggaggtgttggaagctgggcaggatttggatggctctctgtcattgcccagcataaccaattgtgggaccccggtcccctctacacccccagggccggatctccttctacatgaccaactatggtgaggagggcacgcacgtggggagtgccgccgccctggacaacacggacctggtgtttggccagtaccgggaggcaggtacgtctgtccgtggtttggccctgtggtccccattgaagtgtacactttagtttttctgagtgttcttccaggagcagcatagtgccaggaaggtctaaggagctggaagaagagctttccaagcaagaaagagacaagccagggttaggactctggagggggcagtcttcccactctgaaggccagaaagtgtagtggctcagggtctgtgctcttaaccctttgttaccagttgtcaggttttgggcaagtcacttcccttctctgagcctcagttttctaatctccagaagagggattatgacggtacctgcatccaagggtcgctgggaggatgcagtgaagtcaacgttcgctgtgggtgtggcctgtgcaggagaccctgtctgcctggtgcagtgatcccctggcccctcctcaggtgctgtatccttcggggagcaggagcaggtggaagaaccttgacagacctgagtgcggtgcaagattagaggggcccggcaagcccagatgagtgaaaggaaggaagggtcaaagaccaggaatgaagaaaatcattgagcaggaatgagtgcctgggagcgaaggagtgagcccagggagcagtgagtggggtcttccagggagcttgttggtgtggggccctgcatggggactaccctcagagtgtcagcgagcactgatagggccaggaaggcatatcttaaccctttgtcttagatgcttggggcaagttgcttaactgccctgtgcctctgtttcctcattcgtaagggggatggtagcccttcccaagacagctgttgagggcagtcttggggcagttggcaaagtgccctcagcacagagtaagcgctcagggccaggggttggtgtcatgatcggggactcgccctgggacagcccttcagcagggccagaccacgtggctgtccagagcccccatggaccagcatggcttgcagcctgctcctggactgtctactgctcacagctggaccaggcccttggccccacatgctctaggagggcaaacgccctgtggtgtttgtctaaggtctagtgtcatccgtgcggaaaaagatttccagacaccaggcagcaagctgggcccccgccagctgtgctgagcactgcacctgtttttgctgaagggttctcttgtgagggcaccaggcaggaccgagcaagcctcatgggaatcatgggagccgctgagctctccacatgggagagctggccgcctctgcaagaatgactgtccagcactgagggtcagcagaagtgtctgggcagctgcaaatgggactcatgcagaggcagcatggtgcagggtaaggagttgagtcacatccactctagacttcacttggcaggccactcaccttggtgacgctgtctgtcgtctgtgaagtgagaagagtggtgttcatcatgataggtagtgcctccctgggctcttgacaccagagtgctgttctttttttcttctccttttttttttttgagatggaatctcgctctgttgcccaggctggagtgcagtggcgcgatctcggctcactgcaagctccacctcctgggttcacgccattctcctgcttcagcctcccgagtagctgggactacaggcgcccaccaccatgcctggctaattttttgtatttttagtagaggcgggtttcaccatgttagccaggatggtcttgatctcctgaccttgcgatccgccctcctccacctcctaaagtgctgggattacaggcgtgagccaccatgcctggcctttttttttttttttgaggtggagtctcactctgtcgcccaggctggagtacggtggcgcagtcttggctcattgcaacttctgccttccaggttcaggtgattctcctgcctcagactccggagtagctggaattaaaggcatgcaccaccatgcctggctaatttttgtatttttagtagagatggggtttcaccacgttggtcaggctggtttcaaactcctgacctcaagtgattcgtttgccttggcctcccaaagtgctggggattacaggcatgagccaccgcgccgggccagccaaggtgctgttatatgtgctctttagcctcggagactgtcatttcccctcactgcactgcagagcgagggcacaccgggtgaggttagggcaggccccagtggtgttgcctcattgaggcacctcccccatccatgtgaggcaggagaggcaagcattaccatcaactctaaaagccaggtaagaacctgagtcaacaaaggtgaggtcatgggcccaggccacattctcctaaggagtggagccgagtctttttatggcagtctgacccagagacagctctcgctgtttcccacccttggctgtcttcccagggctatatgtggagtatcagtggtggcactggcagggagtggcgcccggtgaaaaggagtgttaagaggaagcacgtgccaggtgtggtggctcacgcctgtaatcccagcacttcgggaggctgaggcgggaggattgcttgagcccaggagtttgataccagcctgggcaacatggcgagacccccatctctaaaaaattaaaaaattagccaggcgtggtggtgcacacctgtagtcccagctactcaggaagctgagtgggaggattgcttgagcccagaggttcaagactgcagtgagctatgattccaccaccgaactccagtttgggtgacagagtaagatcctgtctctgagaccaacaagaaaagaggtagcatgtgtcaagcaagagcagcagttcccactggacctggagtttcctggtgcaaatcagcctgtgagtctgtattttcttttttcttcaagacggggtcttactctgtcacccaggttgaagtgcagtggcatgatctcggctcactgcaacctctgcctcttaggatcaagtgatcctcccacctcagccccctgaatagctgggaccacaggtgcacgccaccacacctggctaattttttttttgatttttggtagagacggggtttcgctgtgttgcccaggctggtctcaaactcctgagctcaagcagtccacctgcctcacccttccaaagtgctgggattacaggcacgagccactgagcctgacaagtttgtacttttagcacgttcccctgcccctgcccagtccttctcacatgggtggacctagtaccacattctgagaaagcctgattccaaggtcctgtatcagtcccttggaccttctttgaccctctacaagacctttctttccctccttaaccagagcaactcctgtttctatctgttacatatgcagcacagccacatcttgtgtggatttgtattatgtccattcaaaagcatgtgtcagaaaataccagtaaacctgtattaaagttggatgttgaagtagtgctaaccaccctcaactctaactaaaatatcaacaagtgggctgggcgtggtggctcacacctgtaattgcagcactttgggaggctgaggtgggtggatcacctgaggtcgggagtttgagaccagcctgaccaacatggagaaaccccgtctctcctgaaaatgcaaaaattagctggatgtggtggcacatgcctgtaatcccagctactcaggaggctgaggcaggagaatcgcttgaacccaggaggcagaggttgcagtgagccaagattgcgccattgcattctgggcaacaagagcaaaactccgtctcaaaaaaaaaaaaagaaagaaaattaggtagatctagtggtgcacacctggaatcccagctatctgggaggctgaggcataagaattgcttgaacctggaaggtggaggttgcagtgagctcagattgcgccactgcactccagcctgggtggccaagccagactctgtctcaaaaaaaaaaaaaaaaaaaaaaaaaggtaactgctgtgtgtaatgtgatctccattaaatttgtatctaaagagcgggttctgcggtaaagaaaggatttggaaagcactgtactagagagctccctctgaataatgttcccggtctgagtgcttgcagcattgatccacagcgctgcccctaaagtgttggtgtgaaggttgtcccactcttcaggcggggcaaagagcttgtctgagggcaatcacaaacccccttctgtcttctaacttcggaggaagggcccccttaacctggagcggttccctttgatggggaggtgggtgttcaccagaggttttgtttgaagaaaaggttttactgccatacatgggttagagtacttctgtagtccagaagttgtaaattagtggtctatgctgttatttggttcataatgatgattttttttttttttcgagacagggtcttgctttgtagcccagattggagtgcagtggcacgatctcagctgcctgcagccttgaacttctgggctgaagcaatcctctgcctcagcctcccaagtagctggaaccacaggcacacatcaccatgcctggctaatgttttgatttttttttttttttgtagaagcgaggcctcaccatgttgctcaggctggtctccaactcctgggctcaagcgatcctccaacgtcagcctctcaaagtgctgggattacaggcatgaaccaccatgcctggccatagtaatgatttatggttagaatatttcttaaaggtaattgaattagttgaaagcacttaaataccagacaatatctcactaagagaaagaaagaaaaaggctagatttctgctttcttttgaaaaatcagattggccttgctgggcagagtcagtcagtctgaacatcagtcttcctcttaaaacaagcctgagctttcctgtctgcctgccagcatgctgcaggtcacccacagggctgaactgtccccctgtactgcccactcggctaaccattgcctcctcccctcctaggtgtgctgatgtatcgggactaccccctggaactattcatggcccagtgctatggcaacatcagtgacttgggcaaggggcgccagatgcctgtccactacggctgcaaggaacgccacttcgtcactatctcctctccactggccacgcagatccctcagggtgaggatgcatgccctgtaccttgcacatgtgcagaccaatgtcacacccctgtccaggcctcagctcttttgcctgccttctgggtggaattctgggttggtgacaccactagagccctggtctgtgctccagacttcttcttcttatttttttcttttttgagacggagtcttgcactgttgcccaggctagagtgcagtggtgctatcgcagctcactgcagcctccttctcccagcttcaagcaattctcctgcctcagcctcccgattagctgagactacaggtgtgcaccaccacgcccagctaatttttgtatttttaatagagacagggtttcaccgtgttggccaggctggtctcaaactcccggcctcaggtgatccacccgcctcagcctctcaaagtgctgggattacaggcgtttaagccattgtgcccagcccactttttttttttttttttttttttttttttttttggtctgagacggggtttcactctcgtcagccaggttggagtgcaatggtgcaatctcggctcactgtaacctccacctcccaggctcaagtgattctcctgccttagcctcctgagtagctgggattatgggcatatgccattgtgcttggctaaatttttgtattttttgtagagataaggtttcaccattttggccaggctggtcttgaacctgagttcaagtgatctgcccaccttggcctctcaaagtgctgggattacagatgtgagccactgcacctggcctgtgttccagactttgaatgcacctcttgtctgggacccttcagaagagggctctgttgctgtccccaccccattcaggggcctgaagcctgtgtgaccacactctggatttcccaaccacatgcctactgcatttgtctgctcacaaacatagccaacgtgtgcaccaggttccactgtgccaatgcttcacgttcatcatctaataaggaccctcattgtggccatggggacagaggttattatttgctcttgttcctgttttcaagagcaggatgcccgtgttttgtgtgtgtgtgagagacagcaagtgaatgggaaaaaaaaaagtgcaggagcctggccaacatggcaaagccctgtccctactaaacatacaaaaattagcttggcatggtggtgcacacctgtaatcctagctactcaggaggctgaagcaggaggattgcttgaacctgggaggcagagtttgcagtgagctgagatcgtgccattgcactctagccaaagtgagatcctgtctcaaaaaaaaaaaaaaggaaattgaagtcaaagagggaagtcactcgctaacggtcatgtggcacagagggagaggagcagggactcaagtcattgactgtgtacctccagagcctgggttcttggccctgacctttgtctgcctcagtcctcagagtcaagtaagcttccccaaagcttaccgtaggtgccctgaagtcccttcccttataagagcttttttgggaagcaaacccactgggtgccaggcctgcaccctcatagtgtggagaacaaggaatcggagccccttcctgtcctccggggcctgtagcctgatctagggttggtctgggccctggcttctttgccctagggcagctgagatgcatgagtttgtgtctctccaggcctcagcactgtgcccagcacagcaggaggctccacaccccttagctcatagtgttcttttgttgaggaacaagaagcagtttgagcctcttaggtgggaggtgggcagggaagctttctcagaggagggggcatttagggggcatttgagctaaaggtaatagggtttccacaaggctggggcgtggccctaaccttccctctgggtccctgctaagtcacttcaaatacacgaagttcctgccatgtgccggtgccactccaagtgcagggaacaaaagcaacgcaaacctcagccctcctggtgctgccattgtggtgggggagacggacagtaacagagatggagagggaactcctggagtatatgagggtgggggtcctgtagggagcagccaagccagccgggtgtggtgcactgtaggggtggctggggtccgtcactggagtgacactgaagtatggaccagaggatgtgaggggggagctgtgtggtgtcttgaggcaggtgtgagcctggcgtgtttgaggagctgggaggagcccagaggggcaggtgtggagtgagcaggtgtggagtgagcgggtgtagggtgagcaggtgtggggtggttggaggtaaagtccaggaggtggtgggtgggggtgcagatggtgcaggttgggtggggcctcaaggcctttgcctgttgcagggatgtcgacttttactcaaagtgggacaggagccgtgggtggggaggagtctgctcttccttggcctggctcacctcttcatggaatccgcgggctgccctgtggataagggattgggcagtgtgtgaagggctagtaaggaggctgctcagtaacttgggcttgaccagggtggtgcagaggaggaggtaagaggggttaggttctgaaggtggagtagatgtggagaatggcgggaagtttggcttggagatgatactggactcttcagcctgagcagttggaagggtggagttgctttcagctgagcaagaggagacctgggtgggcagatgctggggggcatcaggagctgaggtgtttcctttccccttgaagcctggtgactgctggcctgagccacgcttgagccgtgggtcatgtgagtgtgaatgagtgtgagtgcatgtgagtctccgcccctgctcaccaccctctcatcccctgcagcggtgggggcggcgtacgcagccaagcgggccaatgccaacagggtcgtcatctgttacttcggcgagggggcagccagtgagggggacgcccatgccggcttcaacttcgctgccacacttgagtgccccatcatcttcttctgccggaacaatggctacgccatctccacgcccacctctgagcagtatcgcggcgatggcattggtatgggctctgctggctgctccccaccccgctgggatcatctccttccctccccaatcctgccaccttcctgccacccctaccctccttcctggttctcgtcctgtgtcctgtggcgtctggcacttggtcagccacaggagttgaggtcctgagcactcagccttgctctctgtcctctccctgctcgtccccttggcctcgtgcatgttccttatctcagccctggcctgacctgccttctctgtgtccccacagcagcacgaggccccgggtatggcatcatgtcaatccgcgtggatggtaatgatgtgtttgccgtatacaacgccacaaaggaggcccgacggcgggctgtggcagagaaccagcccttcctcatcgaggccatgacctacaggtgcctgccgctccccccgtcagcacccccacagcactgacagccaccgtagcatcttcctcatatcgatcactgtctccaaaacatggccttatcacctgatgttgcatctcccccttgcctttattccgtttccactcctccttccctagttcatcccccatcctccctcctgacccccactccagggagcccacactgacctggggccccttgcccctgtgcaggatcgggcaccacagcaccagtgacgacagttcagcgtaccgctcggtggatgaggtcaattactgggataaacaggaccaccccatctcccggctgcggcactatctgctgagccaaggctggtgggatgaggagcaggagaaggcctggaggaagcagtcccgcaggaaggtgagggtgccccgcccgggagggtgtgctgggggctgctgcggcctgcagagcttgggaaggatttgtggaacaccgaactgggaggctcagggataaccccagtgatgtctcagatgtggcctgtggagccaggctgctggggccatgtgtgtcctggctctgtgtccttggcatgttgccctccacttccttgtctttgaaaggggatgctggtggtgcccatttcagaaactggtttgagactgggcatggtggctcacacctgtaatcccagcactttgggaggccgaggtggcagatcacttgaggtcaggagcttgagaacagcctggccaaacatggtcaagccctgtctctactaaaaatacaaaaattagggctgggcgcagtggctcacgcctgtaatcccagcactttgggaggccaaggcggacagatcacctgaggtcgggagtttgagaccagcctggccaacatggtgaaacctcgtctctaataaaaatacaaaaattagccgggcatggtgccgggtgcctgtaatcccagctacttgggaggccgaggcaggagaattgcttgaacctgggaggtagaggttgcagtgagctgagatcgtaccattgcactccagcctgggcaacgagagcaagactccatctcaaaaaaaaaaattagccaggcgtggtggtgcgtgcctgtagtcccagctactcaggaaggtgaggcagaagaatcgcttgaacccgggaggtggaacttgcagtgattggagatggcgccactgcactccagcctgggcaacagagcaagactatctcttaaaaaaaaaaaaaagctggtttgaggattaggtggcaaaccgtggtggagtgtacatgccctgcccagagtcagtgtgccaccctccctggcccggtcattaggacccagggcccgtgcagcccagtggtgagggcagcacccggcatagggcagcaccgtgtgtcctgtccctgcccttctctgtgcctcagtttcctcattgcttagctgtctacctcttagggctgctgaaagccttaaatgattccacacacttggatagcacctgatccctgctgggatttgagggttttcattacacttctgctaggataatcatttccattgtcgaggtgggaacacaaaggcttggagtggttaattccttgccaaggccccgcaggaggaagcagggtcctgcatgggaggccggctagcctgcccactgccccatgtccccacaggtgatggaggcctttgagcaggccgagcggaagcccaaacccaaccccaacctactcttctcagacgtgtatcaggagatgcccgcccagctccgcaagcagcaggagtctctggcccgccacctgcagacctacggggagcactacccactggatcacttcgataagtgagacctgctcagcccacccccacccatcctcagctaccccgagaggtagccccactctaaggggagcagggggacctgacagcacaccactgtcttccccagtcagctccctctaaaatactcagcggccagggcggctgccactcttcacccctgctcctcccggctgttacattgtcaggggacagcatctgcagcagttgctgaggctccgtcagccccctcttcacctgttgttacagtgccttctcccaggggctgggtgagggcacattcaggactagaagcccctctgggcatggggtggacatggcaggtcagcctgtggaacttgcgcaggtgcgagtggccagcagaggtcacgaataaactgcatctctgcgcctggctctctaccacctctggtctttgtttcctggagtttgggggtgatttgaggccacccccagcttctccaccttagataaataaggtcaaggctcttgagatacctacttcccccggaagcttgcgcaagctggaaggttaacttcagcagacaggatgggggtgggggggtcctccagagatggtctcctgctctctcacagaatgggagaagcctgctgtccagcagagtgatggggagcccagtggagctagccctgcccagcaggggtgcaggggagcgtccaggatgaaggtcagggtgtggccaagccctgctccccaccactccagggccccacagatgcaaaaacaaccccaggcctcagagtggggagtgcatgtttttcaaaaacaaaaagtaggcaaaaacagtccaccaccccatctttcctgcccaggcccctggctgggggaggccaaggagtggcttaagttgtccagcttctgggccctcctccctcccatcaagacctggaaggaggggctgagccaggggccggccccagaggcccaggccaggtcagcacctccgccctccccaatgagagtcagcactggagccttgggtcttgcagttgtttccagagccgaatgctggcctgggggcccaggggccgtaccagcagcaggttgcggaaagcacagtggtccgcagtgcggtctgctggccaggctgtgaggaagcctgggtgggcctggggcaccaggcccagggctcggatgcaaaggccagtgtagacgtcctcaaaggggaagggtgccacacgggctgccgcccgcagcagccagggtgccaggcgcccggcaatgacgtagccacccccgcttgcataggctgggtagccaccttcgaagaaggactcgggcacatagaagggtcctcctggcttccggagaggcatggcctgggtaaagacctcacccaggtagaggcttcgggccgaggcaggtggcagggcccgcaggtgagccagcagggcaggggtgtgtacaaaggcatcgtcctgagctcgcaagacaaaactcacggtggggcagtggcggcccagccaggccagcagcagcaggtctttgagcgtctggttgaatgggacgtcgaggaagtcccagagcagcaggtcactgtagcgacggctctcccaggccactagtgagtctaggtcaggccccgcctcacccaccggagaccctagcaggaagagcagccggatccctggagctggactgccccacgtctctctcacggcctgtcgttctgcaaagcgccctggttctgacttgacggccaacagcaggtaggggacatcagtatctgagcagctggagacttggctgccaccacctccaggcagccactgtgggaagctccggcaggctgctgacagcaagaagcggcggaggtccttggggtaggaggcgaagtcagggatctcggtggcggcggcggccccccaagcctggcagccccccgtttcagtgctgtccccactgggcagggaccccagccgccactgctgctggttccagtaagcaaagggcagcgggatagtctggcccaggcgggtggagaggttggcaggtagggtgggctcagggttggctggcgtggggcttggcggggtgccccgagggctggggtaggccttgctgagccgggactcggatgtccactcgatgtacactttgaggcccaggagtgtgagcagtgctgacaggcagagaaggcacttggggcagcgcatgacccggcccagggaaggggcggccgcgggagctacaagggagccacaggggagccacggaggccattggggtgtggggatgggcctccagagagggcccagccaggccccaggcagacagcttcacaatctcccatagtccccgccaacccccataacagattctctcggtcccagatcctaaacagctcccctgacccagggacctcgttggtccttattcctagacctaggagtcccccattccaatcccgtaccagcaccctgttcttcccactccgtccaaatgcttccaccttcctaaaagcccaagggtctacctcttccctgtctccatccaggacaagggaccttgccgtctatctcctccctctccctccatttattgccctcaccaggaaatcaggagcgggattcctagctccctggggttagaaacccagcctgcctcccgcaacaccccaaccccagggactggggaaccagggatcccatgcttttttacctctgggtctggctcccgccagctccgggtgccggcctcaggtcaggcctccctcagctccctctgatctgcctgccccagcccctgtgttgtcgaccggcggggcccagccctgcccagccagtccagaggggcggggaggggagtggagcgggagcagggagggccccaggggccggggcggggctgaggcaggagagagggagggagggagggagggaggagggcaggaggccgacctgagagatggggctctggcgtgttagggctggtttctggtgagacagctgggaagggtgcagggggcagccacagaaacaagacgggggctttgtgaggcctgggaggggagaaccagggccagggggtgccagggagggtggggctgaaggctgggcctgggctggggagtgttagagtgaccagggcgaggcagggtcccactgaggcagagatggggaggctgagaggctggcgcccggctgcacccatggccaggaggcggcagtgaatgtgctgagtgggaagggatcggcgggcctgccagagggatgtttgttgttgctgcccagtcagggtgaggtggggggaacggggctggtgaggagaaggagagacagagacattgtggagagggaagagacggccagggagcagagagaggagaactggggtgagacaggcgatggagagagctgagggggagagagagagaagacgggcaagtgggaaggtggccaggagggagagggggagggaaatggagatggcgagaaagataaggggttgcggaagccctgtggggtgctcatggggaaagagaggttgagagaggcaggtggagggcagaggggagggactcaggcttccgagccagacccaggcagaggcggagagggagccaaggggaagaacaggagaggaaaagactggagcttcaagggcaatagagggtgacggggtggggcccacggggaaccccgggagctaagctgatcccctgtacctcctccatccctctcggcacccgggctgcctgcccagcagcgtgggaatctgttcctaccttacccccaacctccggcctggagccagcctcaccccgggcccctcccctcccccagcggcactgtgactccaggaacactcacatccagccccttggggcaggagggggtgtctgcctgtgtttgcatccctgccctccaggggcccctgctgttgggactgcatcagctctctgaagacctcccaagacatggggtaagactaaggggctcccactaagcctgggctgaccccttcactccaccctggtttggggcaggcctgtccccatcatggcaggaacacagtctgtcagcagcagcagttgatgatctgtccagccctgatttcctcccccaaagtttgaataatggagcctgtgggaacagctggaggaagagagtggggaggaagtggtgaatattaatggaataatagttggagtgggaaatgacagctaggggctgggggcaggggcccgagcacctcctgagggagtctgcaagcccactccactctggggctgggggagagggactccaggccccctgagctcatctagcttctgggggcagggggtgctgctcctcctggaagcattaggaagcttcacaaggtgcctttctttttgcctttgccatgtgcctcagtccgggtccaatcaggagagagaaaccacacaggaatgggaatagggaaagttcaatatacagaatgattaactctcatgggattggccactaaggggtgccttcttggggaacatggttggagggtggacatgctggtggaacacgatcattccaatccaacacttctgtctccccaagccttgggactcccctcacccatcttatgctagggcagttctggtctctctgcctcattaactttaggccactgttggatccaagttccggttaggcacccaagcaagctattagaactacgtccagctgcacaaggtaacccatgaaatccagaagctctagaaagcgcactcatgccagtaaatttggcctgagctagtgttacatccaccctcattggtgtaacatccttaaaatccccttctgcacacattccccaagtttctgactctgtatatttgcgaagccttgtcattcttatagtgtaaaagctgctcccgcctaggtcctagctggcacctgttcacctggagcaagctgatttcaccctaggtatttatgggtctagaggcagcaaggggcgctgtggtgagtcttaagaagaatggggtgtatctgttatttctgtataagagctggccataagaaaaaaaaaactgtggtgggacagtggctcacccctgtaatcccaatactctgggaggccaagagggaaggatcactttccaggagttcaagaccagcctgggcaacatagtgagatcttaccgctaatcaaaaaaaaaaaaaaaaaaaaaaggacgaccactttcaaggtgtctgcccctggtgaggtcatcacaaggttttttttttgagacggagtctcactctgtcacccaggttggagtgcagtggcatgatctccgctcactgcaagcctcacctcccaggttcacgccattctcctgcctcagcctctcaagtagctgggactacagacgcccgccaccatgcccggctaatgtttttgtatttttagtagagacagggtttcactatttctactaaagtagagtacttaggcaggatggtcttcatctcctgaccttgtgatccacccgcctcggcctcccaaagtgctgggattacaggcatgaggcactgcacccggcctctgtttttttttttgagatggagtcttgcactgtcgccaaggctggtgtgcagtggtgcaatctcggctcactgcaacctctccgcctcctgggttcaagagatcctcctactcgggagggttcagccttccgagtaactaggattacaggtgctcgccaccacgcctggctaattttttgcatttttagtagagatggggttttactatgttggccaggctggttttgaactcctgacctcatgatccgcctgccttggcctcccaaagtgctgggattacaggcgtgagccaccgtgcctggccacatcacaaggtttctaagcacaggaaggctggtaggttcctcagatgctgataagtcactcgcttggagtgacttgggggttcaagatcgcctgtttactctgggtccaattagatgaccccattccaaagaagtaaaaacttttgggccgggcatggtggctcacacctgtaatcccagcactttgggaggctgaggtgggtggatcacctgaggccaggagtttgagaccagcatggccaacatggcaaaaccctgtctctactaaaaacacaaaaattcgcctggcgtggtggtacacgcctgtaatcccagctactcggtaagctaaggcaggaaaatcgcttgaacccgggaggtggaggttgcagtgagccgagagatcacactactgcactccagcctgggtgacatagcaagactgtctcaaaaacaaacaaacaaaaaatctgggggctgtcatgaaagctgtctagttctcagactgtgacttgagctgagttagcggacccaagcttgtcactgtctgtgggcactcaagggcactctggagaatccatccaataccctggtcttcagaattggcacaactagcacagctgttgagcacagcagccacagggggtcccaaggcacgtgcttcagttggtccctcatctccgtcaaccacaggcacttgtgggattatgatgccattgcatgccatgggcctctggcatcctgtttcccatcagcaagagctcagcgcggcgcccaagcccaaaggcacaaccaaaccaatcctggaatcctatcttaagagtcatctcctgggacactccaggtatcaactctatatccatcaggatgcagtcaggagagaaaaaccacagagtaacttgaacagggaaagtttaatatagagaattactggctttaacagtgaactggaataatgagggcttcactggtaaaatgcttctgaattgactggaaatccatttggggtgctggggaacgttattcccagagaggtgcctcagtggaggcgctgtgtctcctacgcaacttctgagggctggagggtgccaagggcagctgctgaccgcctggtgcttcaggagctgggtgctggggaagccacatgcactgcggcgtccagaggcagaagcacaaccaacaagaaccacgaaggaggcgcctttcctcctataatgcctgtttggtgccctctactgacaaagcttatcccctttcaaaaaacagccaactgaaaaagctgaatttggaacataaagtcaataaatccataaccagcaatactatggggcctggggtgcgctggcctttagtgagtggagtggggcgaaggatgctgcatgtcctgcagtgggcacagcggccctgcacgggggagaaccatccctgtaaagtgtcagtagtagcccctgtgtcagtcagggtccctgcaagaaatggcagtgcactcacataaggacagtttgagaagagtctcctgacaaggtgagtgtggctctctgcggctactaacagcctgagcctttacctccccaggcctgaacaggggcatggaaagggctgcctgacagggtgacaggagctgtgacctttagccaagggcagccaggaataaatactgggaactcacgctctctcctgtgattggccagcaccactcccccaccctgacgttgagtgaagacaaatggaagccagaagtgtggtgagctaccagacattccatgcagcccgctgagaagccacgtgagtggggacagggctaaaggctaggcagggacagggctggctgtgtcccgaggctgctcctccggccctgacttcaggccctcagcccagtcgactcccacaacctcgcaattgggcagcatctcctccaccaatatctgagtgaggccagggttggacacggcagggaggtccgagatgtccagcctgcggaggttcctgaaaaggggtgagaaggacaggaagccagtgtaaggacagcatgtgtgtgtgtgtagggaggtacaggacagcgtgtgcgtgtgtgtgtgtgtataggcaggtaagccagtgtaaggacagcgtgtgtgtgtatagggaggtacaggacagtgtgtgcgtgtgtgtgtgtgtgtgtgtatagggaggtaagccagtgtaaggacagcatgtgtgtgtgtgtgtgtagggaggtacaggacagcgtgtgtgtgtgtgtgtgtgtgtgtatagggagataagccagtataaggacagcgtgtgtgtgtgtgtgtgtgtgtgtagggaggtacagacagcgtgtgcgtgtgtgtagggaggtacaggacagcgtgcgtgtgtgtgtgtgtgtgtgtgtgtgtgtgtgtgtagggaggtactggccccaaatttcaaccttacaggacagtgtgtgtgcgtgcgtgtgtgtgtgtgcgtgcgtgcatgcgtgcatgtgtgtgtgtatagggaggtactggccccaaatttcaaccttagcttcctaaaataaaatctttatagctgtccaggcacatgaagcccactgtgttaattgcaaatatgcaactccagctcctgctgttctgcaacagcgtcgatatcacacagttttgactaaaacaaaaaggaagaaaaccaggagtcatttaattcttccagagactcactgtgactgctcatctaccataaatactctaggtttgtgatggatgcagggggatatgagaactgcctaacattgcccctccccacttcctctcctgcatctgggttaggtgggagaggtgcctgggcatgtggcccagcctgagctgaggtctcactggaggtggtggaggcaggcgaggccccgttcggagatgcgggggcaaccggccagcgagagctcctgcaacgagtcggccagtgggtagaggcggctgagacaccagtcgtccacgtggcagcagcgctgcagcgacaaggactggagctccttcaggcggactgcggtggggagagggtgggatggcaccaggagcctttctggagcccatcaccaaagggaaaacatagaggcctgtcccatctccaccccaccgcactcacggaggttatccaggccctcgtagttgatgtcacagtcaccggcatccacagcttcgacaggcacttcacagaaattccagaactcctgagagaaatggccatacttatctggcctgatccactccttgtctcgaaacctggaaacgggaaagggagtgtcagcagggcacctgaacctgccccaggcctccagcctcttcagaaccttccccagccctatataatatgtataggtcacccttgacataactaattccatcttagaaaaagactccatctggctgtgcgcagtggctcacgcctgtaatcccagcactttgggaggctgaggcaggagaatcacttgagttcaggagtttgagaccagcctgggcaacatagtgagacctcgtccctatgaaaaaatacaaaaattggccaggtgcggtggctcacgcctgtaatcccagcactttgggagccgaggtgggcggactacgaggtcaggagatcgaaaccatcctggctaatacacggtgaaaccccatctctactaaaaatacaaaaaaattagctgagcatggtggcaggcgcctgtactcccagcttcttgggaggctgaggcaggagaattgtttgaacctgggaggcggagcttgcagtgagccgagatcgtgccactgcactccagcctgggtgacagagcgagactccatctcaaaaaaaaaacaaaaaaacaaaaattagctgggcttggtggcttgcacctgtggtctcagctacttgggaggctgaggtgggaggatagcttgaacccaggaggtcgaggctgtagtgagttgtgatcatgccactgtgctccagcctgggagaccctatctcaaaaaaaaaaaaaaaaaaaaaggaatgttttgccaattttacatacctagaaactgagggtcagcgagattacagataacataagagcaaagaggtaaaatgcaagaatccttgtagatgggcagaagttaagggacattttcaaacatgtatactgtttctaaggaagttgccagaggaagtgctcaaaccagatggaggggtagatgaagtctatgtgaactgtcttttccaaaaaaagaaaaaaagcaaaggaaagagaaagggaaggagaaaggaggcggggaagaaggaaagaaagaaaaacattattgagcacaggccaggcgccaccagtggctcacgcctgtaatccccagcactttgggaggccgaggtgggtggatcacttgaggtcaggggttggagaccagcctggccaacatggtaaaaccctgtctctaccaaaaataaaaaaaattagccgggcgtggtagtgtgcacctataatcccaggtacttgggaggctgaggcaggagaattgcttgaacccaggagatggaggttgcagtgagccgagattgtgccactgcactctagcctgggcgacaagagcaagactcttgtctcaaaaaaaaaaaaaaattattgagcacatatgcattgctaggcttcttacattgcaaaatcacagttaatctctcactccccctgacagggtcccactgggtagctgggattacaggcatgcaccaccatgcctgggtaattttgtattttggtagagacgaggtttcactatgttgccgaggctggtcttgaactcctgggctcaagtgctgtacctgccttggcctctcaaagtgcaaaggcatgagctaccacgcccagccattattattattattttgagacagagtcttgctctgtcacccaggctggagtgcagtggcgtgatcttggctcattgcaacctctgcatcccggcttctaagggattctcctgcctcagcctcctaagtagctggcattacaggcgtgcgccaccatgccaagctaattttgtatttttagtggagacagggtttcaccacgttggctaggctggtctcgaactcctgacctcagatgatccaccagcctcggcctcccaaagtgctgcgattacaggtgtgagccaccgcgcccggcctattattattttttgtgatgaggtctccctgtgttgcccaggctagagttcagtggtgtgactacagctcactgtagcctcctggactgaagcgattctcccgccttagcctcctgagtggctgggaccacaggcatgtgccaccatacctggctaatttaaaacattttttgtagagacagggtctcacaaagctgctgaggctgttctcaaactcctggcctccagtgaccttcctgtctcggcctcccaaagtgctgggattacagaatgagccagtgtgcccagctccgttcagtctttttttttttttttgacacttttgagatggagtcttgccctgtcccccaggctggagtgcagtggtgcaatctcagctcactgcaacctccacctcccgggttcatgcgattctcctgcctcagcctccccagtagctgggattacaggcgcctgccaccacgcccagctaagttttgtatttttagtagagacagggtttcgccattttggccaagctgctctcgaactcctgacctcaggtgatccgcccgccttggcctcccaaagcattgggattacaggcgtgagccaccgtgcccggcccctgttcactctttatagcaaaccttgtgggttagaaatgaccaccatcccattttacacgtgacaaaactgaagctcaggaacaagtcccaagccacacagccaggaggcggcagagaccaggggactctgaagcctgtgtgactgcagaacctggatgttagagagataccccaccacctgccccagcccgttctaacaccttagcggtcatacttgactgcgcctccctgcttcaggatgaaaaaggcacctgcgccgtatggaccatgttgcttctccagccaggtgtaagatctgcagagaaaatggtagctaagggtgaggcctggggagcaccacagccctcacgatgccccagtgctgttaagaggggcagagtccagagaaccaggcacacagacagattcagtcaggctgaaaatatttattgcccacctcctaagtgctgggcactgggggcaaagtggtgaccaaggcagataacatccctgcccagtctggagattactgcagtaatccaagctattatacagggagaaacagataacaacccaggaaataacagcaaactgcagagaatgtcaattccatgaccaaacaaagcagagaggctgactgtgagggctagggagcagaggagtggggatggtggaggctaactgagtttgggtgttaattggaggaggtgacatttgagcagggatttgagtggtgagaaggaacagagtataaaggctcagagacttgaattaggatggttgaataaataagaaatagggatgtcatgctgaaggggccagtggagtcctgatagggggtctcaaagctcagtaggagctatgttttaggccttggagattggctcttatttgaaggttttgagctggtgatgataagattccttcagctgctttgtagattataaaaaactatgggacaggccaggtgtggtggctcacgcctgtaatcccagcactttggaaggccgaggcaggtggatcatctgaggtcaggatttcgagaccagcctggccaacatggtgaaaccccatctctactaaaaatagaaaaattaggtgtggtggcgcctgcctgtaatctcacctacttgggaggctgaggcgggagaatcgcttgaacccaggaggtggagattgcaatgagccatgatcacaccactgtactccagcatgtgcgacagagtgagactctgtctcaaacaaaacaaaacaaattttggcggggtgtggtggctcatgcctgtaatcccagcactctgggagaccgaggcaggcggatcacctgaggtcaggagttcgagagcagcctcgctaacatggtgaaaacccatctctactaaaaatacaaaaattagctgggcctggtggcgggcgcctgtaatcccagctacttgggaggcggaggcaggagaattgcttgaacctgggaggtggaggttgcagtgagcttagattgcgccactacactccaggctgggagacagagcaagactccatctcagaaaaaaaaaaaaaagagtatgggaacaaaaacccagttagcttattgagtgattcaactataagggatcaggctacgaatggtgaaggcagtgagaactggtcaaatctgagatattctagtattttattgatggtctggatgtggagggcagggaagcaaagagaggaattagggatgactccttagaatttggcctgaacaactgggtgggcagcaccagtgtttactgggatgggaaggcttgggagtgagcagatgtttttaggggagaaatcagggtttggctttagccatgttaggtttgagatgccagttagactctgagtggagctggtgggtggcaaactgcctatgtgagctggagtccttgagaagggtacagcctggagatggagctgcaagagacatcaaggctggcactggaagccacagtgctgcctgggaatggcaaggacaggacctgggctctggtgggccagggtctccacagggtcttgcagaccagggattctcaccgatttttctcatgcaccttgtacatctccctttggagcaagtaatccctcagagcctccacatcgtagaaatagttggtcaggaactggagtattgtccttttcttcttctgattgccctctggggccactgccgcacccaggcgatggatgcccctgatacgcccattccacatgggggcgaccaggcgcagggactggggagggggagaggaaaggagctgagcctggagcctcctgggagacacagagctggatcccccagttcttgctccatgaacctcaatccctctgcttcccaactcaccctaagttcttccttcaaaacttcaaaactgtctttgagattccaaaaatttccccatgttttttccaagttcctcctccccttagtgaaccctaaattttctcgactagccatatattgttgattttcctaaattcttcctctaactttcccccaaacccttatcactcaaaacctgcattatttgacctcttaattttccacagatttgccccttaattacccaattcttctgctggggtcttcccaaatgacttctttctttccccagaatataatcttaaaaacttatctccaaacctcaaggagagggtgctctgagcaatccctaaaaccaaccaagcttgtccaacccgccgcctgcatgcagcccaacacaaacatgcaaactttcttaaaacattaggaggatatttttgtgatttttttttttttttttttggctcatcagttatggttagtgtattttatgtgtggcccaagacaattcttcttcttcgaacagcgtggcccagggaagccaaaagattggacacccctgaaccgagaagggtataaaaagcatgagctttgaagaggagagtaagaaagtcgaggggtgtggccaatgggaagaagcccccaaactcttcaattttgctttcaaggtctcctcttaatctaccccaatttctctttgctttaaccaaattctttttttttttcaaattatctcgataattttacccaaacccttattttcctcaaaagtttaaagctgccaacctctttaattttccctaaattcattccttgattttaaatcctctgaaagaatatctcaaattctcctcttaatttcacccagatcatgcccttagaacctccaaattgacctcttggttcccccacccatcatgcttttgagttttctgtaaaaattcgtcaatctcccactaactttccttacattcatccttcggtcttctaagaccaaatcccacatcctcgaacaatcccttccaagctctcttatcctacaggccccacccttgcctgtccattagctccttgtgtcatccctccctctgattggttagtcgcgtcgctcttcggcagccactccctcatccccattggatactctcagccaagtccctgcctcctctcgctcgctaaagcgtctcctccgcctgcgaccctcacagatccttcctggcccccactagccacaggtttgcactcccagtacggggcttgccaggcttagcctgctgcctcacggctttctgctctcgtggccgccaacagaggccctgaatgcggaggctgtagagcggacttcaaatttggggctctaggaactccggtcacttaccgcccagggagccgccatcttgctaaggtttcgtaaccggaaggggccggtcttatcccacgctcctggttcagcgcgaacttattctcctgtggccacgccccgcgttttctaaccgtcctcttaaaggtgcacgcactttttactcttaaagggtttagggattgctcacagcgccctctccctgagcttcaaaacgagacacaggtcgggctcacgcacctgtgaacccagcactttgtggaggccgaggcgaaagcatcgcttgaagccaggagttcgagaccagcctgggcaacataggggagcctttatctccacaaagaaatagggcaaccttatatccacaaaaaataaaatgttagccgggcgtggtggtgcacgcctgtggtcccagctactcacgaggctgaggcggggggatcacttgagccggggaggtcgaagttgcagtgagctgtgattgcgccactgcactccagcctgggtgacagagcgagacgctgtctcttaaaacaaaaaattgaaaaacaaaacaaaccccaggactccacaatctttccctaggagaagatggggtgttcttcccggcagagtacctttctttcctgactgcaattgcagtctccccaagctttcttattcttccagcttccactcactacctcctaaaaacagggaatgagggggctgaaaagctgaccacgtcatttttaaaaattagggtcaggtaagagagtgggtgaagaggttagatgtcaaggttagagactgaggtgagatctcaagaccagtttggagttgaaagctagatcgcagcatgaagagccattgtgaagtcttgtggatagaattattcattcattagttccaagaatatttactgagcacctaccacgtgatggcaggcactgttctagatgccgaggttaccatggtgagcaggacagacccagtccctctctcaggaagtcaacattctgggctgggagaggatggatgtgggagaggatgaataagaaacaaaggaatcagcaaggcaattttgatgagaagcagataaaaaaaagtgactgggtgtagggccatcagcaaaggcctctctgaagaggtgacattgaagtagaagtgaatgataaggaaagagccattcaaagatctaggggaaaagcgctgcagggagaggtagcctctagagcagagaggccttgaggtgggaaccagcttgcagacagagataggagactgggttgagaggtgggcaggggctgacggtgcaggcctggtagggttttattctattcacagtgggaagaagggagtgtcaaaatcggatttacattttgtaaagattatttctgccaggtggagaatgtaccttagagcagcggtccctaaccgttttgttaccagggactggtttcgtggaggacaatttttccatagactgggggtcgggggtggggtggggatggttttgggatgaaactgttccacctgagatcatcaggcattagattctcataaggagcaggcaacctagatcccccgcacgcacagttcacaatagggtttgcctcctatgagaatctaatgccactgctgatgtgacaggaggcggagctcaggcggtaatgctcacttacccgctgctcatctcttgctgtgcggcccagttcctagcaggcgaggggctggtactggtccttggcccagggactggggacccttgccttagagggcaagggtggatgcaggggaccagtaaaagaggctgctgtagcagtctaggcaagagatgaatggggatggggcagagggaatggtgagaagtgctcaaatcctgggcctgttttgaaggttaagccaacagattgagaaactaaaagcagacgggcgtggctgtgcacgtgaggaaactggaagggcagcaggtttaggaaggtgggtgtggcagctgaataacgaaccctctccccatacctgtgaatccctgggcactgtgactatgttactttctatggtaaaagggacttggggctgggcgcgttggctcacgcctgtaatcccagcactttgggaggccgaggtgggcagatcacctgaggtcaggggtttgagaccagcctggctaacatggtgaaaccccgtctccactaaacatacaaaaattcgccaggtgtggtggcgtgcacctgtaaccccagctgttcaggaggctgaggcaggggaatcgcttgaacccgggaggcggaggttgcagtgagccaagattgcaccactgcagtccagcctggatgacagagcgagactctgtctcaaaaaacaaaatacatatatatatatattgttcatttgtttattttaagatggagtcttgctctgtcgccaggctggaatgcagtggcgtgatcttggcttactgcaacctccacctcctgggttcacaccattctcctgcctcagcctcccgagtagctgggactacaggcacgcggcagcatgcccggctaattttttgtgttttactagagacggggtttcaccatgtggccaggatggtcttgatctcctgacctcgtgatctaccattatatatatgtatatatatgcaccttgggtctgaaggaagggtccaaggccgagagaggcctgcagtgcttcccagacttttccacagcagaagccctcaccctcaacagggataatatacccataggcaagtccagggtcagcagaattggctgcttggccctaggccagcagcctggacacaggcactccagctaagggattgctgtcttggtgcccctgggagccattcctgcccccaaaggcacactggtgggaaagccctaggatgacccgtgccaagaggacaagcaaggaccaagctatgggcaagccagaggtcaaatggaggctgaggagaggctggagaagtggtggtggggggcaggtggaaggacagagggtgccaggcatctacagacactgagcgcccctgaggggtcaggcctgagacaggcagggaagggtggagttagacctctgcaagaggctatgtttgaaccctgtgagcagagttgaggttagacttcagaaggaaaaagaaaagcacaaggccagctgattctctctgaagagtggactttgggatacctttcccaggaacccccatcccactccctctgccctttactctccaccacgcacacagctccccaggggaccaggccaccctggaccttgctacttcctgctccttgcagccatagctcagagacgatggaactgtggaggcagctgaatcaggctggactggtgcctccggggctgggcccacccccccaggccctgagggaggtctccccagtggaaatccctggtcagaccctcaggactgcaggggcagacactggaggtgcctgcgatagtctgctgtggatcagggaggagctggtgagtgaggggtttggaagggaaagagaaagagaggaaatgagaatgaatggaaatgaacaaaaatagagaaggccagagatcgaaaaacagaatctgagagatagaagcagagacatgagaggcatgtacagacaccgagagacagacatagagtgagggacgggaacagaggtggggacagggagatcccaaaagagagggacagaggtgggaagcagagacggagagcaggaacagagatggagagacagactgaatttgagaaagttggggagggcagagagagggcaagcgagagaaagagagccaaaggcaggggcagagaaatggcaacacataaagacagagagacaggggcatggaaagacaaaaaataaatggggacagagacaaagggaaacagggacagatatagataagagagggaggagacagagagagagaagtcagggacaatgaaatggagagacaaagagaagagttagagatcaagagacactctgagaagcaggaaggcagttagggtccatgggcacagtgaggaccctgcccaggcgctgtggccaggacatgagttgggacctgctctcacccaggtcctggagagaccccttgctctctggggtggcatccctgtgacgtccccttcctactggcaggggaacctgcgccgagtggatgtccagctgctgggacagctgtgcagcctggggctggagatgggggcgctgcgggaggaactggtcaccatattggaggaggaggaggagagcagcaaggaagaggaggaggatcaagagccccagaggaagcaggaggaggaacacctggaggcctgcccagccccacatccacctgactttgagatgatgatctgaggctctgccagtggatttagattgacatacaaatgagatgcaaatgtatgtaaaggagaagggagatttgcaggtcaaagcagatgtggaatcaagtatacccctttagtaagtgctttctctgaaggtgcctgcaatgatatttaggcattggcctgtgagctatgggtgtgtttgcagatgacatgaggatgtgtttggaggtgatgtgggaggttgtagagaagttgcaggtgctttcgcagatgagcctcaggtgtgctgctgagatggggatctctgcaaatatgctggtgatgcatacagatgcgatttcagatcaacgctgtccagtatggtagccaccggacacacatggttatttagtgcttgaaacatggggactgcaaattgagatgtgctgtgagtgtaaaatacacaccaaatattaaaggcttagtatgatgaaaagaacataagacatctcaataatttttagattacttattgaaataataatattttgagcatatcagtattagtaaaaatattactaaaattattttcacctgtttctaaattttgtttgtgtgtattgttcccctccctgtgtccatatgttctcattcttttttttttttttttgagacggagtctcactctgttgcccaggctggagtgcagtggcgtgatctcggctcattgcaacctccatctcctgggttcaagccattctcctgcctcagcctcctgagtagctgggattacaggctcacgccaccacacggaactaatttttgtatttttagtagagacggggtttcaccatattggtcaggctggtctcgaacttctgacctcgtgatccactcgcctcagcttcccaaagtgctgggattacaggcatgagccacctcgcccagcctcattgttgtgttacaaagcactttctgttggaagtgagagtcttttcagagaagtgaaatgttgacagaggaggtgctgattcctttccacgggagttttctccttaaaaataagccgcttccactttgggaggccgaggctgggaaatcacttgaggtcaggagtttcagaccagcctggccaacatggtgaaaccctgtctctactaaaaatacaaaaattagctgggtgtggtggcacgcgcctgtaatcccagctactggggaggctgcggcacaagaatcacttgaacccgggaggcggaggctgcagtgagctgagatcacgccactgcactccaacctgggagacagagagatactctatctcaaaaacaataacaacgaaaaaccaagctgcttcgttttgtccagtggagaccccaggattagggtggggtacaggactggggtttaggggttcaggctccatccccagcctggtcctcattagctaacctgagccaggtctgcagctggtgtcagtgctgctgtttgggggttggggagaacgttgaagtcacgcctagcagccagggaagggggaaggacaccccacaaagcatgcaagcggcagggcattctctctctgtcttggcactctagacagaggcccggggagtctgggggtctcttggcagctacatctagacagtaggggtcatggggaatgaggatgttggatgccatggccccagggtctgggtcatgcttcacaagtgccagggtcctctgtctcttggggagaaagagatgaggggggtacaagtgagaggctggtggggcgacttgtaacaggtgctcactattcaagaacagcatgaggccgggcgcgatggctcacgcctgtaatcccagcactttgggaggccgaggcgggcggatcacgaggtcaggagatcgagaccatcctgactaacacggtgaaaccccgtctcaactaaaaatacaaaaaattagccgggtgtggtggcaggctcctgtagtcccagctactcgggaggctgaggcaggagaatggagtgaaccctggaggtggagcttgcagtgagccgagatcgcgccactgcactccagcctgggcaacagagcgagactctgtctcaaaaaaaaaaaaaaaaaaaaaaaaaaggacagcttggaggatggactcgatgtttaaggggagttgccctaatcctatggcctgggccacagaggtgaaatctatggaagagagtgggagtttgggtgaaggggccagcctcacccgtactgtcctcagcaccacactaactgagctccttccagcagtgaccaagtcttttccaggcctgtccttccagatctcccagaccagtgggagaagatacccatccctatccagggacagccaagatggtcagggtggggacagaggaagtataatctgagggatcaaggctgagatgggggaggcacaggaggcggaggggacccagagaaggcaacaggcccaggctgaaatgtcaggaaagtgatcttagaggagaattgaggcaacaaggaaaaatgagccaagtaaagaaagtgaatgaggctgggtgcagtggttcacgcctgtaatcccagcactttgggaggccaaggtgggtggatcacctgaggtcaggagtctgagatcagcctggccaacatggcaaaaccccgtctctactaaaaatacggaaactagccaggcatgggggtgcatctatagtcgcagctactcaggaggctgaggcacaataattgcttgaacccgggaagtggaggttgcagtccgccaagattgcaccactgcactcccacctgggcaacagagtgagactctgtctcaaaaaaaaaaaaaaaaaaagtgaatgaaaaggatataaaagtagaaaaatagcatacacagaagccatggggcttatctagtgatctagccccctgctactcaaagtgcagtcattcatggaatacagcagtaacagcattgttacagctgtctattgctgcataacaaacagcccccagacattgttgtttcaaaacagtgacagcatgcattttgctcacgcatctgcaatctgcagggatccctcatctctgctccacgctgtctgaggcttcagctggaatcattgttggcgcatttgctctcctgtctggcggttgatgctggctgagggctgggggtgcctctgtttctctccctgtcttgtctccacatgggctaagttgggctcccaaggagcttagaggatgggttccaagggcatgtatcctgagagggagccagtcagaagcaacatcgccttgtgtaacccagcctcataagccatgcagggtcactctcaccatgttgatgccatcgtcaagtcctgatcaggttcaaaggaaggggaaatagccgggcgcggtggctcccgcctgtaatcccagcactttgggaggctgaggcgggcggatcacctgaggtcgggagtttgagaccagcctggccgacatggagaaaccccgtctctactaaaaatacaaaattagctgggcgtggtggcacatacctgtaatcccagctactcgggaggctgaggtagaagcattgcttgaacccaggaggcggaggttgcggtgagctgagatcacgccattgcgctccagcctgggcaacaagagtgaaacttcgtctcaaaaaaataaataaaggaaggggaaatggactccaccttttcatgggggagtacaaggttctggaggagcatgtgggaccggaaacattgctgaaatcatcagtggaaaacgcaagttaccccagcagccgcttggtaggtgtgctcactcccagacccatgccagaccaaccaaatcagatgctgtgcatacaagaagagttccacctgctttgtttgcaaattaggtttgagaaatactgttttaaatcacaaatgtgacactgttttgagcaggtggagcagggaaagagtaattacatttagagagctccctctggctgccgcgtggaggttggattagagggctcaagagtggtggtccagtagaaagaaccaaaaaaaaaaaaaaaaaaatggatgaattgaacattatcaaaattccaaacctgtgtacatcaaaaaacactattgaaaatagatggccgggcactgtggctcacacctgtacttccagcacttagggagactgaggctgacagatcgctttgaggcagggagttcaagaccaacctaggcaacatggcgaaacctcggctctactaaaaaatacaaaaattagctgggtgcgatggcaagtgcctataacctcagctactcaggaggctgaagtgggagaattgcttgagcctggcaggtcgagtctgcagtgagccaagatcatgccactgcactccagcctgggtgacagagtgagactgtctcaataaaaaaaaaaagaaaaagaaaataaaaacacaacctatatattaggagaaaatagttgcagaaatatatctgataaggctctagtatctagaatatataaggaacttttacaactcaacaatgtaaagacaaatattaatagttcagttacaaaatgggcaaagaacttgaatagacatttccccaaagaagatgtacaagttattaagccaataagcacatgaaaagatgctcaacatttgtgtcagtagggttcttcagaaaaacagaataaattatatatatagctaagttatacgtataatttaattaagttatgcgtataattatatatataatttattctgtttttctggaggacccaatttatatatataaattggctcatgtaattatggaagctgagaagtctcacgatctgccatttgcacgctggaaatcgggaaagctggtggtgtattcagtccaagtgtgaaggcttcataaccaggagtgcaaatatctgaggtcaggagaagatggatgtctcagctccaaacaaattcccccttttcccctcccctcccctcgcctcccctcttctttttttttttttgagacagagtctcgctctatcgcccagcctggagtgcagtggcgcgatctcggcaacccctccggggttgaagcgattctcgtgtctcagcctctcgagtagctgggattacaggagcgcgccacatgtccagctaatttttctgtattttttagtagaggggatgtttcaccatgttggccaggctggtctcaaactcccgtcctcatgtgatccacccacctcggcctcccaaagtgctggaattacaggcgtgagccacagcgcttagccagaaaattttaaacattacccatgttttggttgtgcttctactgggctcccacctgctgtgatgccctgtctccaccaggtggcgccaacacacccctgcagcccctccagccaaggcagactggacactgaggggcaggacccgactatgaggtcctttgaggaagcaggtccttatagagggcgtcgttgagacaggctattcccacacagggggctcctgttgagagagaaagtccaagttctggtgagcgggagacaggcaggaataatcactcctaaagctacccatgtcacaatccctggaacccgtgaatggtaacttttatggcaaaagggctctgcagttgttaaggatattgaggtggagaaattctcctgggttatgtgggtggccctcaatggaatcccaagtgtgcttgcaagagagagacagagggagccctgaacacagagaaggtgaggatgtgataacagaagtaggagggtgagtggtgtcaggaaggggctggagcgagggatgcagcagcctctagaaggtggagaagcagcacagatgctccctgaggccaccaggtcagtacagccctgctagtaccttcagttgacacttctgactccaaagccataaggacatcaatttgtgtgggtttaagtgacagatttgtggccacctgtagcaacagctacgagaaactcctacaggcaggaacggggggcagaggcaacggtaattttcctattaaatataacttaagctaaaatgaaaatatcagcaatagaactgatgagactgtgggacagctggagcagtcacacaggtgctgggagtgcgtgctggtacaagggctttggaaaaccctgtggaagtgtgtgtgaccctgaacatacggtatctgggagccagcagttcccctcctgggcatatactaaagagaaaaagagaaacacgtgtaggcgctcaccaaagacacctactagaatagtcacagcagcccaatctttttttttttttttggagacggagtcttgctctgtcgcctaggctggagtgcagtggcacaatctcggctcactgcaagctccgcctcccgggttcacgccgttctcctgcctcagcctcccgagtagctgggactacaggcgcccgctaccatgcccagctaattttttttttttttggtatttttagtaaagacggggtttcaccgtgttagccaggatggtctcgatctcctgacttcgtgatccgcccgcctcggcctcccaaagtgctgggattagaggcgtgagccactgcgcccggccacagcagcccaatcttaatagcttcaaacaggaagttacccaaatgcccatcagcaggaatggtggtgtcccaccccttccattgagagtggggtctgtgtgccagtcccctgagtatgggtgggcttgtgacttctaacactaataagtgtggggaaaatgaactgatgtgacatctaaggctgaatcataagaagtgtgagctttggccgggcgcggtggctcatgcctgtaatcccagcactttgggaggccgaggcaggcggatcgcctgaggtcaagaggtcaagactagcctggccaacaaggtgaaaccccgtctctactaaaaatacaaaaattagctgggcttggtggcaggcgcctgcaatcccagcaacttgggaggctggagcaggagaatcgcttgaacctggtaggcggaggctgcagtgagctgagatcgtgccactgcactccagcctgggtgatagagcaatatttcatctcaaaaaaaaaaaaaaaaaagaaaagtgtgatgctgtgtaagaaacccaactgcttcaggatcaccatgttggagaggtcatgtgtagggctcaggtgactgtcccagctgagccgagccttctggctgtccccaccatagtttcagacctgtgagtgaagaatcatcttatacatagaggcctcatccccagctgttccaaccctgagcttttcagtcaccctgagccattcgcctcacccctgcggaggctttagcatcatggagcagagacaaaactccttgggtttgacttttcagaatttttgatccacagaatcatggaattgtcacaccatttagttgggagtggggttgttacatagcagcaaataaccaaacacaaataataaataagttatgggatagtcatgcaatggaatgtttacacagtatctacttgtagatgatatgtcttctccctcaaacagaaagtaagggttcaagagctaagctatgaagatgcaaaggcataagaatgatacaatggacttcagggactccgggggaaagggtgggaagggggtgagggataaaagaccacaaattgggttcagtgtatacttctcagttgatgggtgaaccaaaatctcacaaatcacaactaaagaaattactcatgtaacaaaataccacctgttccccaaaaacttatgaaaataaaattaaaaaaaaaatcatacataggcggggcgcagtggctcaacgcctataatcccagaatcttgggaggccgaggcgggcagattatttgagatcaggagtttgagaccagcctggccaatatggtgaaaccccgtctctattaaaaatacaaaaattagctgggtgtggtggctcactcctgtggtcccagctacttgggaggctgaggcaggagaattgcttgaacccaggaggcagactttgcagtgagtcgagatcacgccattgcactccagccagggcgaagaagtgagactccatctcaaaaaaaaaaaaaaaaaaaaaaattgtgtgtcattggcattaactttttttagtaaagaaaaaaatggaaaaacaaaaaaaaatggagatatgagaggataatcaccctcatatatttaaatctgttatatatatgaaatttgtgcccgggcatgatattggttttgattatttttatttgcttgagaagtatacctaggtttttctttttttctttttcctttttctttttttgttttgagatggagtcccgctcccatcacacaggctggagtgcagtggcgaaatctcggctcattgcaattttcacctcccgggttcaagcgattctccttcctcagtctcccaagtagctgggattacaggcatgagccaccatgccctgcccttcctgctcctcttgagtatgtctagtaattgacacacttggctgtccacacttcttggccttacagacactgtgctctataacatgactcttaggtctctgcagggcagcccccacttgttgcaggctgacgctgctgcctcctcctcaggcccaccttgcttcccatggcatagtgctggccttagccactcccagatactttcatcacactggtgctatgaagccctgccctgtaactgtcccctgctttgagctttgacctatgaaaaatgaccatcacttgcatctcagtgatgctagtgtccctctcactaccgcagtgctcaccagccctcctcaccatcctagtcagctactgggttattttcttctgtaaaaggcacgttctggcctggcgcggtgctgcagaccatcagcacctctgtgatgaggtgctcactgccatcttgtggtgggggggggtcatctaaacccagaagtgattgtcacggttggctttctagaatctttgctggaatcacatgttggggatcatgttctctaaaagcaaagcatgaggaggtgattcaagaggtgcattgggccaggcacagtggctcacacctgtaatcccagcactttggaaggctgaggcaggaggatcaactgaggtcaggagttcgaaaccagcctgaccaacatggagaaacccgtttctactaaaaatacaaaattagctgggcgtggtggtgcatgcctgtaatcccaggtacttgggaggctgaggaaggagaatcacttgaacccgcgaggcagaggttgtggtgagctgagattgcgccattgcattccagcctgggcaacaagagtgaaactccgtctcaaaaaaaaaaaaaaaaaaaaaaaagatgcattgcaggagtgcgctggggagctcgaggaaagcagcgaagaccagatctggctggagaccctcttaagtctgatcccagggaggctctggagcatgcaccgcagcacagaaggggcctcaccttggtcgctcttatatctctgtgctagcgtgtccctggctgttggctgttctcaggaaggaggtgaatagcaaccacctggaccaggtgactgcccttcagctgaggtcaaatctctgcaggaaaatcatctatgaggtaggaatgagcatcctggagaaggggacctgagcagtgcacccacagtaattcctacactgtgtaaatgtctttaaagaaaagtccagggctgggcatggtggcttatgcttgtaatcccagaactttgggaggccaaggtggggggattgcttgagcctaggagtttgaggctgcagtgtgccatgattgcaccactgcactccaacctgggtgacagagtgagaccctgtctctaaacaaaacaaaaaacaaaacaaaacaacacccccaaacccccagaacatcctgttttgagcaggcctatgcaaatttactcccaaaggccaaagaagctgagagtctgaagaagaggctgacaaatcaaatttctgaagtacaaacatttaatattgcttaaagaagagcaggcatgtttgggtggcagggagatgagatggtggaatcccacactgttacctcccagacccaaggcttacatgcaataggatagaatggtataaaagcccttttatactgtgggttatacaaggaattgaagttgattgcttagaagaagagaaggatttgactaagggcagggtttaggtgaaagtagtaactgtaggcacatttctggagctggctttcatcagaagtcaatttggcaggtgagcatccaagatgaagtgtccttattctccacactccatccccctaattcggctcttacaatctcacgcgccttcctcttccaagatggtccctgagcctttaggcagggaggttggggtgaacatgctgcatcaatgtgttttctacttttttaagcagaggccacagcaacactacagcaggctttgtagaaatcatcagcagcctttgtagaaacagcaggctttgtagaatcatcttcagaatactgtgattttggttaattcagaagtactacaatgaaagatctataacattaataatttgaatagtaggaatagaatgcacacaggattacaataaaaattgttgttgcattagaagccaactaaaactatcataaagaaaaagaaaacccatttattccttggatacttgtagtcaggaaataattcagaatttagaccaaattgcaggtaaataataaaaacctcaaaaacaatgtttagggctagaatctaataacaggtgtagtatagttttcttctgaaacctaattttttttatcttcagtttccacatttctatgaaggataaattgtagtaggaccaatttatttgcaaaataaattttaatttcattatacttggtctgattattattattattatttgagacaaagtctcactctattgcccaggctggagtgcagtggtgtgatctcagctcactgcaatctctgcctcccaggttcaagtgattctcctccctcagtctcccaagtagctgggattacaggtgcatgccaccatgcctggctaattttgtatttttagtagagacagggttttatcatgttgcctaggctggtcttgaactcctgatttcaggtgatcctgcctcagcctcccaaagtgctgggattgcaggcatgagccaccgtgcccagccgtggcctgattatttgcaataatgtgtagaaagaatagtgattggccatatagcctcttttaaaattggctttgctggacctttcacaagtaattttggactagatgtttagaaacatcaagggcaggaagcaaaaccaataatttgccatcagactgtgcttgtagtacctgtataaccatgcaacatgttcttcttgcccattgcacagacaaaaccaatttactgagtccgtggtattgcagtagagaaggtttaattaaatcagagcaacccaaggggtaggactgggattattaatcaatctccctaataactcagaggctaggatttttatggataatttggaaggcagggggctagggaatggttgctgctgattgtttgaggatgaaatcataggggtgtggaaaatggtcctcatgcactaagtccatctctgggtgggggtcacaggactggaaatctcaggacctctggccatgtgactcctgagaagcaagagattatagaaaggcaagctgtgggacaatgacttgttatcagtcagctacacctgcattttagcagaattcaggcccctctcataatcttaatcttgtgggctttcatttgtcatacaaaggtagtttcagtccctgagcaaggaaggggttcattttagggagagactattatcatccgtgcttcaaagttaaactataaactaaattcctcccatggctagcttggcctatgcccaagagtgagcaagggcagccagcctgaggccagacacgagatgaagtcagccatgctggacttctctcatattcataatctttgcaacagcaatttcacctgtatgaactgggtgaattcccccatcttcttgagatccctacataacttgaggttcctgagcctgtcagaaagtgacattctttactttccacaggtgagggaccttaaaaggaaagcatattgaaaatatacccagtctttttttctccaagaagattcttatcagctccataaagtcaacttcaattcctcaaataagtcgtatttgaattcattccactgtaagccttcaaagagtaatgagtatctccaatggttcctgttacgaaagaaaaccgaatctgattgagcttgtgccaataattatattgccataagtaaaaatactcacaaatagtttccaaattttggagaattcttacagggagaaaggtcagtttcactcacaaaagtatacttggtcaattgctgttagttataaatagctcaaaagaaaggttttcctgatgcttcttctaacagagtggcagtcttccaaacaggatgttgtctgttcactttggaattgctatccagagagcaagcagctctttgtcggccaggcgagagctgtttattaggcactgtagaatctagcagcatctcgagatggagcagggacccctcttaggggcttactcgatcaccatcagccagtatggagataaaggaaaatcttgacttccttcaagggaaattccaggcatctagctaggcttgagaagtaaatgagcaacttgatcaacgagaaggtaatggtaacttaaaacaatagccaaggaaattggagtcgtaacatatttggttccctgtgaaaactaaagataacatcttaacatatgtctctgagttgtttccggaaacctggaccctcaccagaaaatactaaaaatacaaaaattagccaggtgtggtgatgagtgcctgtagtcccagctactcgggaggctgagacaggagaattgcttgaacccaggaggtggaggttgcagtgaggcgagatcatgccattacactccagcctgggcgacaagagtgagacgtctgctaaaaaaaaaaaaaaaaaaaaagaaaaccaaagacattgcttactctcatcatccattagttactctcatcatccagttactctcatcattcattttagtaaaggctcctccagaagctgatagcagtctcactcagattgtaccctctggtttctgtactttgttttgctcctccccaacagttactaggttcttggtaaccacaattctcagaagtactttctattgtccctacatgatttggtctttgggaggtggctctgagctagtggctgagactcacattcactgaaatctaagcttagtgtagcatcaagattgaagccagcactctgttttaattttactttagctatgacaggtaacaataactatgggattgaatattacccttttttcttattttgtttgcattttcttaggcatccagtaaactgactcctccaagagttggattcatttctaaattccccagcaaactttaccttcagtaactgtggctctgtgccatgggtaactacatggccactcaggaatcagaggttcctcattactcacctttttatttttttgctttctatacattcaattgtatctatatcattgtgaaagaaaacagaatctccaggcccccaactcactatggctaagggcaagtgaagtttggaaacgtagtcacacaatcctgctttcttttttccccaaacacatagctgtaatttcacaaccctgcgtcattgccgtatcattggggtaaacgagaatatcccagtgacacaaggacacatatcttcccagatggctttcctcataagttgctcacgcggaaattccttgtgagcccctaactctttcaggagaaatattgtaaacaaaaagtaaaattctaatccccccaaccaaccgaatagagccccttcttgtccaagggtatcccctgcaaacctgaaaaactaattcaggtcacgatgagaaggcagggggtcagacacacctcattatatttcttccctttggagttcatgcaaagtgaccagcactaacattaaaacagagatcctggctgggcacaatagctcacatttgcagtcccagcactttgggaggtcgaggtgggcagatgacacgaggccaggagttcaagaccagcctggccaacagggcaaaataccatctctactgaaaatacaaaaattagctgggtgtggtggcgcacacctgtaatcctagttacttaaggggctgaggcacgagaatcacctgaacacaggaggcagaggtttcagtgaatgaagatcgcaccactgcactccagactgggtgacagagtgagaccctgtctcaagaaataagaggaaaaaatagagatcccaacagtgacggaacagactctttgttgcaataagataaccgactccaacctgactctggtatagcatcacataatagataacattccctaaaggaaatcaaagtattttatccccaaatgtatttctttgacatattttggaatggccctgcaaagccatctcttattggagaaatctatagagcatcctcttcctggcttggcacggtgggtcacgcctataatcccagcactttgggaggctgaggtgggcagatcacaaggtcaggagtttgagaccagcctggccaatatggcaaaaccccatctctactaaaaatacaagaaaaaaaaattagctgggtgtggtggtgtgcacctgtagtcccagctactcgggaggctgaggcagaagaattgcttgaacctgggaggtggaggttcaagcaattgtatatttaggatattacaagtatcctggattaagtaatatcctggatattaggaaccatattataaggagggtggacacctttttcgatatggggagtaatattatgctctccccccagaatattatgaacaatttcacaaggggggtgtacacatcctgtgacaatgggagtaatatcatcctctttaaaaaaatattagtatcgatatcatggaggggtgtacacgctctgcaatattgggagtaatattattctctttttccccggatattcacaagaatgtcacagaggtggtgtacaattcctgtgatattgggagtaatatattctctccccctagatattagaaacaatatcaaatggtgagtgtacacactctgtgaaattgggagtaatgtcatcctcttccccctggatagtaaaaacaatattactgggggttgtgtagactttctgcgatattgggagtaatatcatcctatcccgccctggatattaggatcaatattacagagggtgtacaccctctgcgatatagggagtaatatcatcctttccccccgaatattaaaatcaatatcacagaggagtatacacctcctgtgatattgggaataatatcatcctctcccttccctgtacgttagaaacaatatcacaaggggtgtgaacacctcctgtgatattgggagtaacatcaccctattatctttggatattaggagcaatatcaccttgggggtgggcaccttctgtgatattggtagtaatattattctctccctccctggatattaggaccaatatcacagaaggggtttacaccttttctgatattgggagcaatattatcctcttctcttctggatattaaaaacaatatcaaaaggtcggtgtacagcccctgtgatattgggagtaatatcatcctttttccccataaatattaaaattaatataattttcttccccctggctattaggcacaatatcacaagggtgtgtacacccccttcggtattaagcgtaatatcatcctctcaccccctggttattagaaacaatgtcacgggggagtgtacatcccctgcgatattgggagtaatatcatccctacctccctggatattagaaacaatatcacaggggagttgtaagcttcctgcgatattgggagtaatattatcctctccccttctggatattaggaacaatatcacagggaaagtgtacaccttctgtgatatagggagtaatatcattttctcccccactggatgttagaaacaatatcacagggaaggtgtacagcccctgccatattaggaataatatcatcctctcccctcatggatattaggagcaatatcacaggggaatgtacaccccttgcgatattgaaagtaatgtcatcctcccctactctggatattaggaacaatatcacaggggttgtgtacacgccctgcaatattgggagtaatattctctcccccactggatattaaaaacaatatcacagggggttgtacaccccctgcaattttggaagaaatattatcttttctccccgtgtatatcagaaacaatatcacaagggggtgtacacactctgcgatatcgggagttacactgtcctctttccccatacatattagggacaatatcaatacgtgggtgtacatcccctgtggtattgttcttaatatcatcctctgcccccctatataataaaaacaatatcacaggaaaggtgtacatttcctttgatattgagagtgatatcatcctctttccccttagatattataaacaatatcacaggaggggtgaacaccccctgtgatatagggagtaatatcatcctctaccgccctgaatataaagagtaatataacagagggggtgtacacactctgtgatattgacagtaatataattctctgccccccagatattaggaacaatatcaaaaaaggggtgtacaacccctgtgatattgggagtaacatcctctccttccctggatattacaaacaatatcacaggggaatgtacaccctcccctgtgtatggggtagtaatataattatctcccccactagatattagaaacaatatcacagggaaacaatatcactgcgatattgggagtaatactatttctcccagcccgagtattagaaacagtatcacagggggagtgtacactccctgcaatattgagagtaaaaccatcctctccccacttggatattagaaacaatatcacagggaaggtatacgtccccttagatattgggggtaatagcattctcttttttcctgggtattaggagcaatatcacaggggtggtgtacaccctgcaatactgggggtaatatcattctcttcccttttggatattaggaacaatatcacagggaaagtgtgcaccttcggcgacattaggagtaatatcatactcttccctccttgatattagcaacaacgccacaggtttacatcccctgtgatattgggagtcatatcatcctcttttccccttgatattagaagcaatatcacaaagggtgtattcattccctgctatactgggaagaatatcaacctctttttttcccctggatattaggaataatatcccagggggagtgtacccattctgctatattgagagaaatatcaccctcatttcccctggatattagaaacaatataaaaggggggggtgtacacttcctgtgatattgggattgatatcatcctcttcctttttggatattaggaacaatatcacaggggggtgaacactctttgtgatatggaaagtaatattatcctctccccccctggatattaggaacaatatcaaagagggcatatacatcccctgcgatattgggagtaatattatcctctccccccctaaatcctaaatattaggagcaatattacagggtggagtttacaacccttgcaatattgggagtaatatcaccctctcctcccctggatattaggaacaatatcacagggatgtgcacaccccctgcaatatggagagtaatatcattctctcccttcctggatattaggaaccatatcacaggtggggttcacaacccctgtgatattgggagtaatatcatcttctttttttctggatattaggaacaatgtctattgggggaactagcccccaatatttcaaagtaggttcttttctattttccttaagtgtcacctggtctgagaaataaagtgaaagagtacgaaagagaaattttacagctgagcctccggggtgacatcacatatcggcaggttctgtgatgaccacctgatctgcaaaaccagcaagtttttattagggacttcaaaaggggagggggatacgaatagggagtgggtcacagagatcacatgcttcaaatggcaataaaagatcacaagggcagaagggcctagcaaggtcacaaggccagggagaaaatggaattactattgaggttccatgtcctgctgtgcacgcattgtcattgataaacatcttaacaggaaacggggttcaagagcagagaactggtctgactagaattcgccaggctggaatttctaatcctagcaagcctgagggcactgcaggggaccagggtgtatttcatcccttatcttcaaccacataagggatacacccccagagcggccgtccataggcctcccctaggaatgcgttcccttcccagtgatatttctcctactcattttctgcaataagaaaaatgtgactctgttctgcccagccccacaggcagtcagaccttatgcttatctcccttgttcgctgaacatcgctcttatcctgttctttttcagggtgcccagatttcatattgttcaaatacacatgttttataaacaatttgtggagttaatgcaatcatcacagggtcctgaggcgacatacatcctcagctcacaaagatgatgagattaagagattaaagtaaagacaggcataggaaattataaaagtattgattggggaagtgataaatgtccatgaaatcttcacaatttatgttcagagattgcagtaaaggcaggcataagaaattataaaagtattaatttggggataatatccctgtaatatccctggatattacaaactttaccacaaaggggtgtacaccccctgagatatggggataattacaccttccctccccccttgattttacgatccatactacaagggggtgtacactccctgcaatatggggagtaatagcaccttttcccctgctggatattacgaaccacaggggggtgtacaccccccttgatatggggagtcatagtgtagcaggaggagtcgcggacaaaaccccacagacaccgaggtagtgaaggaagtggcttttaatcagctggaagcatcgaaagactagcgtctcaaaatccgagcttgttgagtgcacaatttctgtcctttttaagggctcacaacactaaagatcttacatgaaagggccatgattgattgagcaatctagtgggtatgtgacaggggctgcaggcaccggtaatcagagtgaaacagcacagaacaagaaatttcacaatgtccttccatacaatgtctggaatctatggataacattggttgctaggtcatgggttgaattttaactatcaggctaaggtcaggcaggcccaggcctggtttcgggtctggttttgggtctggtgcctggcgccgggctgcctgcttttggtttcacttccttgtttcttcttaaaacaggtactgagtataaaataatatagaacaatatggggggtctctttctctcttcttttgatagcatcccctcaccccggatattacgaaccataccataggggggtgtacgcctcctgcaaaatggggaataatagcaccctctcttaccctggatatttcgaaccataccacagggaggtgcactccccccacgatatggggagtatgggggtaacagtaccctcaatcccctggatattacgaaccataccacaggggagtgtacatttccagcgatatgaggggtaacaacaccctctccgttcctggagaatacaaaacataccacacaggggtgtacacaccccgcgatatagggagtcatagcatcctctctccccctggatattaggaaccgtaccgcagcagggtgtacatgccccgcactgtggggagtaatagcaccctctccctgcctggatattatgaaccataccacagtggggtgtacaccccttgcaatatggaaagtaatagcaccctctttccttctggatattaagaaccataccaaaggggggtgtgcactccctgcgatattgaaagtaatattatcctgttcccttctgggtattaggaacaatatcacaagggaatgcacatgccctgcggtattttgagtaatatcatcctctccccttctgaatgtcaggatcaatatcacagggaggtgtacaccttctgcgatattggaagtaatatcatcctctccttttctggatattaggaacaatatcacagaaggtatgaacacccctgctatatatccagtaatatcagcctctcccctcctggatattaaggagaatatcacgggggggggggtgtaatatcatcctcttccctgctggatattaggaacaacatgacagggtgggtgtacacttcctggataatgggattaatatcatcctctttcttcctggatattaggaacactaccataggggaagtgtaacccccctgcaatattggtagtaatatcatcctctttttccctgattattatgaagaatatcacagcggggatgtacaatttctgctatattgagagtaatatcatcttctccccgcctgaatattagaaacaatatcacaggaaaaatacacaccctctgcgacattgggtgtaatatcatactcttttcccatggatattagaaataatatcataggtggggtgtataccccctgcgatattgggagtaatatcatcctcaccacttctggatattaggaacaatatcacaggaggtgtgtacaccccttgctacaatgggagtaatatcatgctctttccccctggatactaaaaactatatcacaagaaaggagtacaaaccctgtgatattgaaagtaatattatcttctttcccccttaatattaggaacaatatcacatggggtgtgtacacctcctgcgatattgagagtaatattattttcccctcgcctggatataaggaacaatatcacaggaggggtgtacaccccctgtgataatgaaagtaatataatctcctccccctcttgatattaaaaacaatatcacctgaggagcacacaccccctgtgatatggagactaatatcattttctccccaccgaaatatttagaacaatatcacggggggtgtacaccttatgtgatattgggagtaatatcatcctctcccaccctgtatatcaaaaacaatatcacagggagtgtgtacactccctgtaatattcacaataatatcatcgttttcttccctggatattaggaacaatatcacaagggtggtgtacatcccctgtgatattgggagtaatatcatcatctcctcccatggatattaggaaccatatcacaggaggggtgtacaccttgtgcgatattgggagtaatattatgttctctccacctggatattaggaacaatatcacatgagcggtgtacaccccctgcgatattgggagtaatgccattttctcccccttgatattaaaagcaatatcaccaggcggagtgcacaccccctgcgatatcgagactaatatcattttctgccaacctaactattaagtacaatatcacagggggtgttcaccccttgccatattgataataatctcccctcctggatatgaaaaacaatatcacaggggcgtcgtgcaccccctgcgatactgggagtaatataatcctctccacaccctggatatgaggaacaatattacaaagcgggtgtacaccccctggaatattcacagtaatatcatcgtttcctttcctggatattaggaacaatatcacaaggggggtgtagacctccagcgattttgggagtaatattttcctctccccctctgtatattagaaaccatcatgggggggtgtacaccacctgcgatattgggagtaatatcatcctcttcacccctggttattaggaacagtatcacttgaggggtgtacctctactgcgatatcaggcataataacatcctctccccccgaatattaagaacaatatcacaggtggactgcacaccctctgtgatattgaaaataatatcatcctctgcttccctgaatattaggaataatatcacaaggggggtggacaaccccttctatatgaggagtaatatcctcttccttcctttatattaggatcaatatcacaaggggggtgtacaccccctgcaatattgggagtaatattaccctctctttttctggatatcagaacaatatcacaggggaagtatacattccctgtgatattgcgagtaatattctttccctctactaaatatttgcaacaatatcacagaaaaggtgtacaacccctacgatattggcagtaatactattctcttccccctggatattaggaacaatattacaggttaaatgtacactcctaagatattgggagtaatatcattctcttttgctctggatattaggaacaatatcgcaagggcgatgtacactctctgagatattgaaagtaatttaattatctccctcccggctattaggaacaatatcaccggggagtgtacaccctctgcaatatttagagaaataagatccccttttcccctagattttaagaactatattacaggggatgtgtgtacaccccctgcgatgttgggagtaatatcatcctctctccccctaaatatttggaacaatattacaggggtggtgtacacaccctgcgatactggcaataatgtcatcctctccttttctgcatattgggaacaacataatgggggagtgtacacctcctgcgatattaggagtaatatcatcttcttctgccctggttactaggagcaatatcacagaaggttgtataacccctgcgatattgggagtaatatcatccttccccccacgtatatcccagccttgatattaggaacaatattacaggggaggtgtataccccctgctataaggggagtaacataatcccctttcttcctggatactagcagcaatatcacaggggttgtgtacaacccctccgatattgaaagtaacttcatcttctttccctctgaatattaggaacaatatgatgcggaaggtgtacaccccctgtggtattgagagtgatatcattttctcctagcttggatattagaaacaatatcacaggaggggtgtacacccactgcgatatcgggagtaatataatcctctcccacccctggatattaggaacaatattaggatattaggaaggtgtacactccttggaatatttatagtaatatcatcgtttccttccctggatattaggaaaaatatcagaagggggtgtacacaccccagagattttgggagtaatatcaccctctcccccggatattaagaacaatgttattggaagtgtgtatgccttctgcgatatttggactcatatcattttctcccaacctaaatattaagaacaataccacagagggtgtacagctcctgcaatattgaaagtaatatcatcctctccttccctagatattaggaacaatatcacagggcgtgtacacctcctgcgatattgggagtaatgtcatcctttcccatccttgatattagaaaaatatcacaggggggtatacactccctacacaaattgaaagtaatatcctctccaccgctggatattaggagcaatataacgggggagggcctgtatacaccctgcaatattgggagcaatattattttctcctccactggattttaggaataatatcacagtgtgggtgtaaaccccctgcgatattgggagtaacatcatcctctttccccatggatattaaatacaatatcacaggaggggtctacactgtctttgatattgggagtaatattattctttctcttccttgatataaggaacaatatcagagggggatatacaccacctgcaatattgggagtaatatcatcctttccctttctgaatattaggaacaatatcacaaaaaaggtgtacactgcctgcaatactgagagtaatataatcctctcccttcctggatattagaaacaatatcccaaaagggatgtacactcccagcgatattgaaagtcatataatcgtttccttccctggatattatgaagaatatcacagggtgggtgtccactttctgcgatattaagagtaatatcatcctctctcctcctgaatattacgaacaatatcgcatggaggatgtacatcccttgcgatattgggagtaatatcctcctctctcccccttgatattaggaacaatatcacgggggagcggtgcacacaccctgcgatattgggactaatgtcatttccccccacccggatcataggaacaatataacagggaaagtgcacaccccctgcgatattgagggtaatatcatcctctcccgccctggatattaggaacaatatcacagggcgttgtacacctcctgcgatattaggaacaatatcatgctgtccccttctgtatattaggaacagtatcacagggggttgtacaccccctgcgatattgggagaaatattatccccttctcccctgtatattaggaaccatatcacaggctgtgtgtacaccccttgtcatattctgagttagatcatcctctccccctctggatattaggaacaatatcataggcgtgggtacaccccctgcaatattaagagtaatatcatcctctccctccctgaatgttaggaacaatatcacagggggaaagaaccccctgcgatatttggagtaatatcatactctccccacctgtatattcagaacaataacacaggggatttatacatcccatgcaatattgaaagtaatatcatcctctctccatctggatattaaaaaagaatatcagaggggggagtacacaatacatcccctttgtattgggagtaattttatcttctctctttttaaatattaaaaacaatatcaccggaaaggtttactccctctgtgatattgaaagcaaaatcatcctctaccccctggatgtaagaaataatattatggggagggtgtacatcttctaagatattgggagtcatattactttctcccctcctggatattagaaacaatatcacggggagggggtacagacccagcaattttgaaaatagtattatcctaactcttcttccgctggatattaggaacaatatcgcaggggttgtgtaaactccctgtgatattgaaagtaatatcatcctctccctccctggatattaggaccaatatctcaggaaggttgtacaccctttgcgatattgggagcaatattatcctcttccaccccggatattaggaacaacatcacagggtggggtacaccccctgcgatattaacaataatatcatcctctcctcccctggatattagaaacaatatcacagggatgcgtacaccccctgtgatattgaaaataatatcatcatcttttcctctggatgttaggaacaatatcacacagggggtttacaccgcctgtgatattgggagtaatatcattctctcaatccctggatattaggaacaacttcacagggggagtgtacaccccctgcgatatcgggagtattatacccttctccccctgtgaatattagaaacaatatcacagggaatctgtacatcccctgtgatattgacaataatatcatcctctctcccccagatattaggaacaatatcatagaacgggtgtacacccgctggaatattgggagtaatatcattttctccacccccggatattagaaacaatatcacagaaccagtgtatacgccctgcaatattgacagtaatatcatcctctcttttcctggatattaggaacaatatcacaaaggggtgtacatgccctgtgctgctggaaatagtatcatcctgtgtcttcctggatattaggaacaatattaaagggggaatgtacaccccctgtgatattgggattaatatttttctttcccctcctggatattagaaacaatatcacagagagggtgtacccccctgcagtattaggagttatatcatcctgtttcgttctggatattaaagacaatatctcaaagggtgtgtacacccctttcagttttggaaggaatgtcaccctcttctctcctggatattaggaacaatgtcacaaagaggaagtacacaccctgcgacattgggagtaatatcatcctttttcccccttgatattagaaacaatatcccagcggggtgtacagcccctgtgatattgggagtaatatcatcctctctcctgctgcatattggcaacaatattacagagtgtatgtacaccccctgtgatattgggagtaatattctttctccccatgaattttaggaacaacatcacaaggcgggtgtacatgccctgggatattgggagtactattatcctctcacaccctggatattaggaagaatattacagcggggtgtacaccccctgtgatacttggagacatatcctctccccttctggatattttgaacaatatgataggtggtgtacagcccctgccatatggggaggaatgtcattttctcctttcccggatattacaaacaatatcacagtggggtgtacacccactatgatattgcaagtaatatcatcctctcccattctgaacattccacttccccctggatattacgaataatatcccggggcgggggtgtacaccccctgcgatattaagagtaatatcagcctctttcttctggatgttacaaacaatatcacagggaggtgtacactctctgagatattaagagtaataacatccttttttcctctggatatttgggacaatgtcacaggaggtgtacacactttgcgatattgggacagatatcatcccctccccctcttaatattatgaacagtattcaaaaatgtacaccccctgcaatattgggagtaacgttatcatctttaattctggatattacgatcaatatcagaagggggtgtacacctactttgatattgggagtaatatcatcctctcccccccgaatattgtgaacaagatcacagtgtggtgtatgtcccctgcaatactgggagtaatatctttctttccactcatgaatattagaaacaatattacagagggagtgtacaccccctgcgattttggaagtaatatcatcttctccacttccgaatattaggaacaatatcaaagggggggcctacactccctgagatgttgggagtaatagtatcctctcccctccctggatattacaaacaatatcacaggggagtgtacacctcctgtgatattgggagaaaattttctctcattccggatattataaacaataacacagtaatgtgtacaccgcctgcgatattgaaagtaatattatcctttttccctctgaatattgtgaacaatatcacagggaattgtacaccccctgcgatattgacagttatgtcatcctctttcccctaggatattatgaaccatatcacagggtggtgtatatcttctgcgagattcagaataatatcatcctcccttcttctggatattatgaacaatatcacagggagtgtacagtttttgtgatattgttagtaatatcatcctctccccttcttaatatcatgacaatatcacagaaaggtgtacaccacctgcaatattgggagtaatatcatcctctctacctctggatattacgaacaatatcacgggggggtgtacacttcctctcctcccctggatattatgaacaatatcatagagtgttgtacacaccctgcgatattgggagtaatataatcgtctcttcccctgaatattacaaacaataaaacaagggggtgtacaccccctgtgatattaggagtaatatcatcatttccccatctggatattacaaacaatgtcagagtaaggtgtacaccttctgcgatattggcaataatatcatatctccccttctggaaattaggaacaatatcataggggggtgtacacccactgtgatatttggagtaatatcactctctccttccctaaatattacgaacaatgacacaggagggttttcaccccttctgatattgagagtaatattatcctctctcccctggatattacaaaaaatatcacaaaggggtgtacaccctttgtgatatagggagtaatatcctctttttccctggatatcatgaacagtatcacataggggtgtaaaccttctgcgatattgagagtaatatcctctccttgcctggatattacaaacaatatcacaggagttctacaccccctgccatattgggagtaatatcgtcttctccttccctggatattatgaacaatatcacagagtggtgtaaaccttctgcgatattgggagtaatatcatcctctctttccctggacattacgaacaatatcacagaggggtgaacaccctccccaatagggcgagctatatcaccatctacacccctggatattacgaaccatatcaaagaagggagtacaccctccgtgatatggggagcaatatcaccctctccccttttgcatattatgaaccatatcacagggggctgtacacccttcgctttatgaagaacaatatcaccctcttcccgtctgggtattatgaaccatatcacaggggagggtgatccttccgcgatataaggagcaatatcaccctttcttcccctggatattacgaaccatatcacggggggtgtacaccccccctgatatgaggataaatgtaaatttctccccccatgaatattatgaaccaatccaggggggtgtacccccactgcgatatggggagcaatatcaccctctaaccccctggatattacaaaccatatcacagaggggtgtacacttctgggtattacgaaccatatcacaggggttgtacacccctcgggttatgaagagcaatattttcctctttcctcctggatattacgaaccatatcacaggaggatgtacgtcccccgcgatatggggagaaatatcaccctttcctttcctggatattaccaatcatatcacggagggtttacaccccctgcgatatggggagcaatatcactctctcctcccctggatattgcgaatcatataacaataaggtgtacaccttcctcgatgtaaggagcagtatcaccctctccactcctggatattacgaaccatattacatgggggtgtacactctccacaatatgggcagcaatattacctttttcttccctggatataacgaaccatatcacagaagggtgtacatcccctacaatatggggagaaatatcaccctctcccccacccggatattacagactataacacaggggggtgtacacacagaatatttacaatatcacagaaggggtgtacaccctttgtgatattaggagaaatatcattgcctccccttctggatattaggaatgatatcacggtgggggtgttcatgccctgaaatactaggagtaatacctttctctccccacccctgaatattaggaacaatatcaaatgggggtttacaccttctgtgattttgagactaataacctctcccccactggatattaggaaagacatcacgagggaggtgtacaccttctgcaatatagaaagtaatatcatcctctcctcctctgaatattaagaaccatatcacaggaggagtgcacactctctgcgatattgggagcaatatcatcctctttcttcctgaatattaggaagaatatcacagggaaagttatgcctgtaatcccaggactttgggaggccaaggtgggtggattatttgaggtcaggaattcaagaccagcctgaccaacatggtgaaaccccaactctactaaaaatacaaaaattagcctggtatggtgacagctgcctataatcccagctactccgaaggctgaggcaggagaatcgtgcgaacctgggaggcaaatgttgcagtgagccgagattgcgccattgcactccagtctgggcggcagagcaagactccatctcaaaaaaaaaaaaaaaaaaaaaaagaatcacgggggggtgtacacaccattcgatattgggagtaatatcatcccctttccccctaaatattaggaacaatatcacaggaagcgtgtacatcccctgcgatattgggagtaatatcacactttcttctcctaggtattactaacaatatcacagggggagtgtacatcccctgcgatattgaaagtaatatcatcctctttcttcatggatattaggaacaatatcataaaggtggtgtacaccccctgtgatattgggagtaatatcgtcctctccccccatcgatattaggaacaataacacagggttggtgtacaccccttgtgatatttggagaaatatcataatctccccaacctggatattaggaacaatatcacagaggggaggacaccccctggaatattcacagtaacatcatcgtttcctttcctggatattgggaataatattatcctctccaccctggatattaggaacaatatcacaagaggggtgtacaccctttgagattttgggggtaatatcatcctctcccaccctggatattaggaacaatatcacagggagggtgtacatccctctgagatattaagaataatatcgtcctttcccccatgggtattaggaacaatatcacgacaggtgtgtacacctattgtgatactgggaataatactatttcacccccccccgatgttgggaacaatatcacgggagggggctgtacagcccctgtgatattgggagtaatatcatcctttcatttcttggatattagaaacaatatcacggggggggcacactcccttcaatattaagggcaatatcactctctttcttcctgaatgttaggaaaaatattacaggggaatgtacacctcttgcaatatttggagtaatatctcctctccttttctggatattaggaactatatcaagggggggtgtacaccttctgcaatagtggtggtaatgtcatcttctttttccctggatattagcaacaatataacaaggaaggtgtacaccccctgcgatgttgaaagtaatattatcctctccttttctagatattatgaacaatattacagggaaggtgtacatcccctgcgacattgggagtaatatcatcctctcccatcctggatattaggaacaatatcacaggtggggtgtagacctcatgcaatattgggagtaatatcatcctctccctctggatattatgaggaatatcacagagggtttacctacagggtgtttaagatattgagagtaatatcatcccctccctaactggatcttttgaacaatatcacagaagggtgtacacttcctgtgacattgggagtaatattattcttcctcttatggatattacaaataatatcacaggttggtgtacagtctttgcgatattgggagtaatatcattctctcccccccggatattatgaacaatattacagtggggtgtacaccccctgtgatgctaaaagtgatatcatcctatcccctcctgggtgttaggaacattgtcacagagggggcacaacccctgagatattaggagtaatataattctctcccacacggatattacaaaaaatatcacagaggctgtacacacagggtgtttagaatattgagaataatgtcatcttctccctccctggatattacaatgaagagataacatccattactgctgctacagtggaggtacaactgatggtgtttgcattagtttcctgccatctgccatcatccttctggattttgaagataccagactggtgaattccgtgaaagagatgagtggaccaacactcgtctcgcagaagttggcaaggaatacatcaatttcctgacccttgcccttaggccattactctaacaggggtcatggtgatgtttccaaccatgggttttatgccagcaagaccttcatggccaacagcttctgaaagataacaatactcacctttgttcagtgctcagttacctaagcaaatgattgtaggtcttttccaagggaagctggagaatcccaaagttgtatacttcccttggttttgcatgaacctgcctcatgagaacccagtctctttttgaattagaccttcttatgtgagaactgtctcaggttttaactggatgaaggatgatgactttatatgagggctgctgacatctgtttctgttcctcttgatgatttctatttcctgttactgaagggactcacttgtctgccatttatatctgttgtccctaatgaaacatactctaagaggtaagtgctagatattgcaaagcagtcctcccctgatgcactctggcactggtgccagctccttatgcccaccttgcattgatggcaaagtgctggcctctgccattcccacatcttctcaccactttgttgctatgaatggagcccatctctgtaacagtgtggcctgctttaatgtctgacccatgaagaatgtccagcacttgatcttagccatgctggtgtccctctcactggggcagtggtcatgggcagccttttttttttttttttttttttttgagacgatgttttggtattgttgcccatgctggagtgtagcagtgcgactggggctcaccgccacctccgcctcccaggttcaagcaattctcatgcctcagcctctggagtagctgtgattacaggcgtctggcacaacacccatctaattttttgtgtttttagtagaggcagggtttcaccatgttggcgaggctggtctcaaactcctgacctcaggggattcacccaccttggcttcccaaagtgctgggattacaggcatgagccaccctgcctggccatcatgggcagtcttaaggatgatagtcagctcctggttcttcttctatagtagacccagtccaagatgcccactgatcgagtttggatctgtgtccccacccacatctcatgtgtaattgtaatccccaatggtggaggtggtcctggttgggccggtgagaattgagtggatcatatgggtggatatttcatgaataatttagcaccatcctctaggtgctgtctggtgatagagttctaaaaagatctgattgttcaaaagtgtgcagcacctctcctaccactagctccagctctggccatggaggatgagcctgattcccttgtgctttttgccatgactctaagttttctgacgcctccccagaagttgagctgatggccagcatcatcctttttgtacagcctgtggaaccatgagccaattaaacctgagtttttataattaattacccagtctcaggtaattctttatagtaatgcatgaaaagactaatacatgtacttctgaaccatgttattctttaccccaaagctatacatccttgcaattctgtgctgatcctaaccacctgcagtgagcccacactcctcaggttctgggcaaatttttccaccagcctaacctcacatccaatgctagccccagttttgcgatctcaggccactcacactaatctaaaacttgctgcaaattcaaaaggtcccatcactctcaggatgactattcagatagcaacactcatggaactaaaaaaaatcactggggtggggatcacatcccggcatttatagagtgactacatcccagacatgtgaagaaaactgaggagggaaccccaagggcttgaaagaccttgccgagtgtggagccctgaagtgcacataccactcggttgtcccccaggggcctgggaaccttgccaagtgcggggtctctagagcagaatccacaccgctggggaggtggatttcaggccagaaaccttcagggacctggagtcccaacacatgctaaaaacaggggtaggggcacagatatgaaagattttggagtatttggagcccagaagagaaaactgaaggtggcagcgtggagcgctcagaagatggcggagaccatggagcccaaaaaatccagaaaaagaggcggggacaggggatggacctcagaagcattcagaacgcacagggccccctccaaggtcgctttcacactgccaaggcttcctctgcagctgcagagctgcacttttcctctgtcccaacaaaaatatgtcccttgaaggtctcatctcccatggactggatctggatctgggcctcatttatccaggggcctcagtcctcaaggaggccattgtcactctgcttcccgataaagtcctcttaagttagtaaatgcccctcaagggacccatggtttgtccttattcctccctgagtcttctccttctgagggaggaagttttcaaacacccccaggatttactgccagaatttcaccctctgaaacctcctccttccctagatccagtccagctcctcatcctcagccccccagaccccatggaggtgtcccatgcaatgggttttttctagattgacagcctcccctcctcagcgtacaactcagagactcaccctgttctgagcagcgagccaccgcataagcagacatgagacctcactccagccaaataacactttatttttgtagtttcaatgcttttcttccccgaggaaagggaggagctcaggagaacagtgtcatcaaaatttcctggtggttgtttaatcacagcagcagagtaggtcaggaaactcttccagattaccctcttcctcctgaaattaaaggaaacatgcacgactcatgaactgataaggtttcccaacaattgtgcgaatatcctgctggatttatgagctgaaagtaaacctgaatgacttgtgctgcttgtccaggcattatcttcttcaggaaatatgagatgttgtttggaagcatttcagaagcaagggaagctgctttgttgaatacatagatgagcatcttcttgattagaaacttcaacccagcgattaagggtctcgttactagttttgagacatatgtcattaattggtcggcaaaccatttttttatcacatccatcagaaaatcgaccactttctccactagcatttccatggccatgttcattataagtgaagtaaatgagctcacaaaaagtgtaatgagtgttctgtcggtttcacgtaaagatatataatggtatcgtccctggagagcgtggccattttatgggaggtgacgtggagggggcgggccaagatggccaattagaagaggctgccttccactgaattaaagtctcagtgaatttcacgataagcacgtgaactgaaatattcaggttctcacattgggactgactaggcaaacaacttgacccaggagaacaaagaaaacaggggtgggtgatgaaccacgctatattggaacagagccaaaggaaccttcttgcacagccaagagaagccatgagtgtgtgaccccgccccagaaaccatttttctcccttggatctttgcaaccaagaaatcaggagatcctcccatgggctgagtcacggcggccttgggcctagtacacagggctgtgtggagtgttggcagagcagctgctcagacacagaccgagacccaggaggtttacacaatctagccttgagaaaccaggaaaggtgggagttccgttggtacattcccccagtaagggggctgaattcaggtgttatacgagttgttaagaaattattttgggcagacagggaggaaaaggggtccttgggaagttttgtttcttcttaaagcagctccagaaatgagtcttgtctagcaggaaagccccggcttttagagttctccggtaaccttgatctgcagatgccggccattagaaactgggtccacccaaacatagcgattcccgccctcttctggcccttgtccccacctgtgcctggcgatatggccacccccatatatccccatgagtgtaggaaatcagggtgtccggcacgtgcatattcaaaggctaggtgggagggccagtttttccgtgggccacataaatgacatgcctggtcgaaccaatcgcctgaaccctatgcaaatcagacaccaccccctccagtttcttcatataactcattggtatccacagcactccgggtttcctcttttggctttggagcccccctccctctgtctcagtatggggagctcttccttcgttcttgcctattaaactgcacgccataaaaccactgtacatgtgtttgtgtcattttctccaattctgtgtgagacatgagccctggtgttcctccactcatcacagccatatcacagggagccagacagcctcatcctgtggtccccatcatcacagcacttctcaagtcccacgggcttggaataccagccaagcagtggcaagatagcaagccaagtgcctgagactaccgagttctgggtggttggggcggccaccgtctctgtttccgtagactcagacaatctagccttcgggctccagggagggcagctggtctggagcaggaggggtcccccacaaggcagcactgctgctgtgcctgatagtggccagactgtttctttaaatttgaccttgattcatccctcctcactgggaaggtcctccctgttggaatttcaggaactccagccagggttatagggttggtgggaagcctgatctctttctgggttggaggtcctccggggatgggcggctgccatctttgtaattgtggactcaaccttttcagctgaagcaaatgaacaaagctgggagcatcacatttcctaactctaaaatatattacacagccatagtcaccaatacagcatggtacaggtataaatgtggacacacagattgatgtaacagacgagagaatccaaaatgaaagccacacattcataggcaactgatctttgacaaagctgacaagaatatacactagggaaagcacacccttttcaataattggtactgggacagttgcattgtcatatgcggaagaataaatctgaactcctatttcttaccatgtttacaaaaatcaatttaaagtgaattatagactgaaatgtatgtactgaaatggtcaaaatatcagaagaaacttagggaaaactcttctggtcattgtccagtaaagagttcacgagtaagacttcaaaagtacaggcaacaaaaccaaaaagagaccaatgtaaatttaaaccaaactaaaaattttaattaaattaaaaagccatacaccatttttctatctcatccctaagaaaatggaccacgtcatccactagcatttccatggcaccttcattataggcgaagtaagtgagcccatgataagtgtaatgagccttctgtttatttcaggcgaagttaagtaatggatattcctggagtggtgtggattttacagaaagtgacgtgaagtgggcaggccaagatgcccaatgagaagcagctgtcttcccctgaatgaaaagcacggtgaattcagcaccttgaactgaagtatccaggttcctacattgggactgattaggcaaatgacttgacccaggagaagaaacaaagggggtgggtgatggtgcacccagtatcagcacagagccaaagaaaccttcacctacagccaagagaagcagtagtgaatgcacaacccctacccacaaaccatgtttctcccatgcatctttgccacgcatggatcagaagatcctcccattagctcatgccataagggtcttgggtcagatacacagagccgtgtcgaatgttgccagagcactcgctcagacactcacagagactcaggagttttatatacttggaaagctgggcaaggcgggagttccatctgtacattcccttagaaaaggggctgaatccagggagccaagcagcctcattccgtgggccccacttccacagcacctctcaagttaagacccactggcttggaatagcagccaaccagtggcaatcggctggagactgcctgagactacagttttctggggaggtgagggcggcctccatttctgtgtttccatggactcagacattctagcctgcaggctccagggaatccaggtggtctggtcccccacaaggcagcacagctgctgtgcctgattgtggccagacagattccttaagtaggaccttcattcatcccccctcactgggtagggcctccctttgggaatttcaggagttccagccatggttatatggtcagtgggagccatgatctttttccgggaaggagccctgcgaggaggggcagcttcatctctgcagctgttgactcagcctttctgaagcaaataaacaaagctgggagcatcacatttcttgacttcaaattatattacaaagccatcatcaccaatacagcatggtagtagtatacagatagacacacagattgatgtaacagactagagagcccagaaagaaagccacacatttatagccaactgatctttgacaaagctgataagaatatacgttgaggaaagcacacccttttcaataattggtgctggaacaattgaattgtcatttgcagaagaataaacctggactcctatttctcactatttctacaaaaatcaattgaagatgaattatagacttaaatatatgtactgaaataataaaaatgtgagaagaaacctagagaaaactcttctggttattgtctagtaaagagttcaagagtatgacttcaaaagtacaggcaacaaaaccaaaaatcgaccagtgcaaatttaaaccaaactgaaaattttaattatataaattcaaaagctttactgaaacaaaaagctgctgcacagccaaagaaataatcctctcaacagagtgagcagacaaactgcagaacggaagaaattatttgtaaacttttcctttgacaaaagactaataccgagagtaaacaaagatctcaactacaacagaaaactccaaagaatcccattaaaaagtcggcaaaggacataaagagacttttttattttttatcttatttatttattcatttgtttttatgagacaggtctttctctattacccatgctgtagtgcagtgccatgatcttggctcactgcgacctgtgcctaccgggttcaagcaattcctgtgccttaacctcctgagtaacttgcaccacaggcacgagtcacagcccgtggctgattttttgtatttttagtaaagatggggttttgccttgttggccaggttgatttctgcctctttgcctcaagtgatccattggcctcagcctcccgaagttctggggttacaggcatgctcaaccgcacctggacaggagtcagtttttaaaagagcacatataaatggccaaaaggtatttcaaagaaattctccacaccatgaatcgtcagagaaatggtcattaaaaccacattgaggttgggtgcgctgcctcatgactgtaattccaacactttgggaggctgaggcaggtgtatgatgagctcaagagactgtgatcatcctggccaacatggtgaaaccctgtctttactaaaaatacaaaaaatgagccaggcctgttggcacgcgcctgtagtcccagctactcgggaggctgaggcaggagaattgcttgaacccgggaggtggaggttgcagcaagccacgatcacaccactgcactccagtctggcaacagagtgagaccccgtctcaaaaatatcaacaaccaccacaatgagatatcttactccagtcagaatgggtattatgaaaaagacaaaaacataacaaatgttagtgagaatgtggagaaaaggggaaatcttatgcattgttgttgggaatgtaaattagcgcagattttatggcaaacactatggagatttctgaaagaacaaaaaatataacaactactcagtcctgcagttgcagtactgggtacctactcaaaggaatagatcaaaatgcacacaaatatttgctgcagcattatttacagtagcaaagacatggaatcaccctacatgtcaatcaacagaagaataaataaagaaaatgtggtatgtatacatacaggaatactattcagttataaaacagtgaaaatcatgtcttttgcagcaacctggaaggaactggaggtcattattttgggtaaaacaagccaggcagagaatcccaaatatcacatttttcaggaccagcagggtatttcacacctgtaattcccatgcttttccaaaacagtataagagaattgcttgatgactgggtgacacagtgagaccctatctctgcaaaaacaatatatgtgtatatatatatatatatggagagagagaaatcagctgggcatggaagctgggactacaggtgcgtgccaccacacccgggtaatttttttgtgtgtttttagtagagattgggtatcaacaggttgctctgagtggtcgtgaactcctgagctcaggcaatctgccctccttggcctcccaaagtgctgggattacaggtgtaagccaccactcacagtcttccttccttcctcccttcaggtgattgctcagatgctgcttattcttggaggatatccctgaccaacttatagaattagcgggaaccttatggttgacacatttcctatgttcctcacctgctttcttttcttgtggaggacttacagctgtctgaaatacagcatgtttctttcttgattgcctttctctcctcccgagaatatcagttgcacgaggccagtgactgtttctctcttttctgagtctcctgcaaccaccggtagcatacacatagtgtatccttaatatctccttgttcaaaaggtgaatttcttgaagctggggggcagaggttgcagtgagctgagattgtgccacttgattccagcctgggcgtaagagcaaaacttggtttctggctggggggaaaaaggataaatttctctattcatgaaaaattggacattgggaatcaagtatagccaccttagtttttcagtgataattccagccctgtcaacttgtaggaatcatgtacgatggttccctttgctggaggctattgctgtgtaataaaatatccctaattagtaggaaagaataaccatcattgatttgtgctcacaaatgctgtgaacaagaggttctgatgaggagagtggagatgacttctctgtgtgatctcagctcactgcaacatttgtctcccaggttcaagcttctcctgcctcagcctcccaagtaaattggattacaggcacatgccagcatgcttggctaatttttgtatttttagtagagacagggtttcatcatgttgaccaggccggtctcaaactcctgaccccaggagatcagctcgcctcagtctctcaaagtgcaggaaatacagatgtacaccactacacccactcttaagtttttacttatgaataataacactgacagtgttctaaattctctaaatggtcaaatggataaagaaataagacccaacttatggtgccttaaagaaatcaacttcatctatagagacaccgaaagggaaatgaaaacagggaaatggaaaaggatatttcatgaagctggaaaccaaaaaagtgccagagtagctattctcatattagataaaatagactaaaatcacagactgtaacaacaaaagacaaggagggtcactagttaatgataaagaggtaaatcggcaagaggataccacaatgattaatacctaggtacgtgacaccagttttttcaaatgtaaaaagcaaacatagattgccattccaagatggccgaataggagcaactccggtctgcagctcccagcctgatccacacagaagatgggtgatttctgcatttccaactgaggtaccttgttcatctcattgggctggttggacagtggatgcagcccatggagggctagctgaagcagggtggggcattgcgtcaccgggaagcacaaggggttaggggatttacctttcctagatgagggaacccgtgacagactgtactgggaaaattgggacactcccaccttaatactgtgcttttccaatggtcttagcaaatggcacaccaggagattatatcctgtgcctggctcagtgggtcccacgcccatggagcctcgctcactgctagcacagcagtctgagatggaactgcaaggcggcagactgggtgggggaggggtgttcaccatttctgaggcttcagtaggtaaacaaagtggtctggaagctcgaactgggaggagcccaccgcagctcaatgaggcctgcctgcctctgtagactccatctgtaggggcagggcatagctgaataaaaggcagcagaaatttctgcagacttaaacatccccatctgacagcactgaagagagcagtggctctcctagcatagtgtttgagctctgtgaatggacaggctgccttctcaagtgggtccctaacccccatctagcctaactgggagacacctcccagtaggggccaactgacacctcatacagccaggcacccctttgagacgaagcttccagaggaaggatcaggcagcaatatttgctgttgtgcaatatttgctattctgcagcctccgctggtgatacccaggcaaacagggtctggagtggacctccggcaaactccaacagacctgcagctgaggaacctgactgttcgaaggaaaactaacaaacagaaaggaacagcatcaacatcaacaaaaaggacatccacaccaaaaccccatctctaggtcaccattatcaaagaccaaaggtagataaaaccacaaagatggggagaaaccagagcagaaaagctgaaaattctataaaccagagcacctcttctcctccaaaggatcgcagctcctcaccagcaatggaacaaagctggatggagaatgactttgacaagttgacagaagcaggcttcagaaggtcagtaataacaaacatctctgagctaaaggggatgttcaaacccatcacaaggaagctaaaaaccttgaaaaaagattagacgaatggctaagtagagaaaacaatgtacagaagaccttaaatgacctgatagagctgaaaaccatggcatgagaactacatgatgcatgcaataccttcagtagccgatttgatgaagtggaagaaagtatataagtgaatgaagatcaaattaatgaaatgaagtgagaagagaagtttagaggaaagagagtaaaaagaaacaaacaaagcctccaagaaatatggaactatgtgaaaagattaaatctacgtttgattagtgtacctgaaagtgatggggagaatggaaccaagctggaaaacactcttcaggatattacccaggagaacttctgcaacctagcaaggcaggccaacattcaaattcaggaaatacagagaatgccacaaagatactcctcaagaagagcaactccaagacacataattgtcagattcaccaaagttgaaatgaaggaaaaaatgttaagggcagccagagagaaaggtcgggttacccacaaagggaagcccatcagactaacggctgatctcttggcagaaactctagaagccagaagacagtgggggccaatattcaacattcttaaagaaaagaattttcaacccagaatttcatatccagccaaactaagcttcataagtgaaggagaaataaaatcctttacagacaagcaaatgctgagggattttgtcaccaccagacctgccctaaaagagctcctgaaggaagcgctaaacatggaaaggaacagtcagtaccagccactgcaaaaacatgccaaattgtaaagaccatcaaggctaggaagaaaccgcatcaaccaatgagcaaaataaccagctaacatcataacgacaggatcaaattcacacataacaatattaaccttaaatgtaaatgggctaaatgctccaattaaaagacacagactggcaaattggataaagagtcaagacccatcagtgtgctgtattcaggaaacccatctcacgtgcagagacacacataagctcaaaataaagggatggaggaagatctaccaagaaaatggaaaacaaaaaaaggcaggtgttgcaatcctagtctctgataaaacaggctttaaaccaacaaatatcgtaagagacaaaaaaggccattacataatggtaaagggatcaattcaacaagaagagctaactatcctaaatatatatgcacccaatacaggagcacccagattcataaagcaagtcctgagtgacctacaaagagacttagactcccacacaataataatgggagactttaacaccccactgtcaacattagacagatcaatgagacagaaagttaacaaggatacccaggatttgaactcagctctgcaccaagcggacctaatagacatctacagaactctccaccccaaatcaacagaatatacatttttttcagcatcacaccacacctattccaaaattgaccacatacttggaagtaaagctctcctcagcaaatgtaaaagaacagaaattataacaaactgtctctcagaccacagtgcaatcaaactagaactcaggattaagaaactcactcaaaaccgctcaactacatggaaactgaacaacctgctcctgaatgactactgggtacataacaaaatgaaggcagaaataaagatgttctttgaaaccaacgagaaaaaagacacaacataccacaatctctgggacacattcaaagcagtgtgtagagggaaatttataacactaaatgcccacaagagaaagcaggaaagatccaaaattgacaccctaacatcacaattaaaagaactagaaaagcaagagcaaacacattcaaaagctagcagaaggcaagaaataactaaaatcagagcagaactgaaggaaatagagacacaaaaaacccttcaaaaaattaatgaatccaggagctggttttttaaaaggatcaacaaaattgatagaccggtagcaagactaataaagaaaaaaagagagaagaatcaaatagatgcaataaaaaatgataaaggtgatatcaccactgatcccacagaaatacaaactaccatcagagaatactacaaacacctctacgcaaataaactagaaaatctagaagaaatggataaattcctggacacatacaccttcccaagactaaaccaggaagaagttgaatctctgaatagagcaataacaggatctgaaattgtggcaataatcaatagcttaccaaccaaaaacagtccaggaccagatggattcacagcccaattctaccagaggtacaaggaggaactggtaccattcctcctgaaactattccaatcaatagaaaaagagggaatcctccctaactcattttatgaggccagcatcatcctgataccaaagccaggcagagacacaaccaaaaaagagaattttagaccaatatccttgatgaacattgatgcaaaagtcctcagtaaaatactggcaaaccgaatccagcagcacatcaaaaagcttatccaccatgatcaagtgggcttcatccctgggatgcaaggctggttcaatatatgcaaatcaataaatgtaatccagcatataaacagacccaaagacaaaaaccacatgattatctcaatagatgcagaaaaggcctttgacaaaattcaacaacccttcatgctgaaaactctcaataattaggtattgatgggacatatctcaaaataataagagctatctatgacaaacccacagccaatatcatactgaatgggcaaaaactggaagcattccctttgaaaactggcacaagacagggatgccctctctcaccactcctattcaacatagtgttggaagttctggccagggcaattaggcaggagaaggaaataaagggtattcaattaggaaaagaggaagtcaaattgtccctgtttgcagacgacatgattgtatatctagaaaacccattgtctcagcccaaaatctccttaagctgataagcaacttcagcaaagtctcaggatacaaaatcaatgtacaaaaatcacaagcattcttatacaccaataacagacaaacagagagccaaatcatgagtgaactcccattcacaattgcttcaaagggaataaaatacctaggaacccaacttacaagggatgtgaaggacctcttcaaggagaactaaaaccactgctcaatgaaataaaagaggatacaaacaaatggaagaacattccatgctcatgggtaggaagaatcaatatcgtgaaaatggccatactgcccaaggtaatttatagattcaatgccatccccatcaagctaccaatgactttcttcacagaattggaaaaaactactttaaagttcacatggaaccaaaaaagaccccgcattgcaaagtcaatcctaagccaaaagagcaaagctggaggcatcatgctacctgacttcaaactatactacaaggctacagtaaccaaaacagcatggtactggtaccaaaacagagatatagaccaatgcaacagaacagagtcctcagaaataatgtcacatatctacaactatctgatctttgacacacctgacaaaaacaagaagtggggaaaggattccctatttaataaatggttctgggaaaacaggctagccatatgtagaaaggtgaaactggatcccttccttacaccttatacaaaaattaattcaagatggattaaagacttacatgttagacctcaaaccataaaaaccctagaagaaaacccaggcatttccattcaggtcataggcacgggcaaggacttcatgtctaaaacaccaaaagcaatggcaacaaaagccaaaattgacaaatgggatctaattaaactaaagagcttctgcacagcaaaagaaactaccatcagagtgaacaggtaacctgcagaatgggagaaaattttcacaacctactcatctgacaaagggctaatatccagaatctacaatgaactcaaacaaatttacaagaaaaaaacaaacaaccccatcaaaaagtgggtgaaggatatgaacagacatttctcaaaagaagacatttatgcagccaaaaaacacatgaagaaatgctcatcatcactggccatcagagaaatgcaaatcaaagccacagtgagataccatctcacaccagttagaatggcgatcattaaaaagtcaggaaacaacaggtgctggagaggatgtggagaaataggaacacttttacactgttggtgggactgtaaactagttcaaccactgtggaagtcagtgtggcgattcctcagtgatctagagctagaaataccatttgacccagccatcccattactgggtatatacccaaaggattataaatcatgctgctataaagacacacgcacacgtatgtttattgcggcactcttcacaatagcaaagacttggaaccaacccaaatatccaacaatgatagactggatgaagaaaatgtggcacatatacaccatggaatactatgcagccataaaaaatgatgagttcgtgtcctttgtagggacatggatgaagctggaaaccatcattctcagcaaactatcacaaggacaaaaaaccaaataccgcatgttctcactcataggggggaactgaacaatgagaacacatggacacaggaaggggaacatcacacaccggggactgttgtggggtgggggaggggggaaggatagcattaggagatatacctaatgctaaatgacgagttaatgggtgcagcacaccaacttcacacatgtatacatatgtaacaaatctgcacgttgtgcacatgtaccctaaaacttaaagtataataataataaaattaaaaatgaaatgaaataaaataaaataatgtgttgtaagatggtatttgcaaacttcacggtcacctccaaccaaaaaaacctactattttcttttattatactttatttatttacagatgatgtatttatttacatcattatttacagatttacagatgatgtatttatttacatcattatttacagatgatgtatttatttacagatgatgtatgatatctcctttaagtgggtaaaaatttgagagcagaaaactcttgttttgtttgttgccatatccataacacctggcccaaggcctggcatgaagtagctgctttgtcaatatgccattgaatgaatatttgaatgaatgaatgaactatgtggtttgggtaatcctcactgagaagattacatgcaagctgagacctgaatgataaaagaagatcattcaggagatctgggagatctgggtgaagaggatatggcttgaagccactgcacgtgcaaaggccctgaggcaggggtgagcttcgcagggaggtggagcagcaggcaggaggccagtgtggatgaatccaagggagtgaggggaagagtgggaaaggatgagggccaggtctagaccaggatgaggcacagaagggttttgccactttctccactgacagtgaagccttcgtgctcaccctgtgagtatgggtgcacgtgtgatgtcgacaactaaggtgtgtggggaaggtgaatttatttgaatttattcaaaacttgataagcaaatttatgaaaagttaacttatcttgtcttatcaacccaggactaatgtttcaataattagcttggaaaaatgaggagttagcctctatgacttgtgtaatagcagtgaaagctctctgttccaggttagggagggatggagtagcccagtttcagaccccaagtgggtgaagaggtgtccatgggagagtgtctcagtgtgagtgtcagagcccatacaagagtagagccctccatggaggtgccacttggggtgggacctcagagtccgagcaggccatgaggccatccacacaggggcagtccagcacatggagtcagagtcaggcatggagaaaaggacatcattaatagggcctctggatgtcatacccttctcagactaagtatttctgccctaattatataccaggatctgaccctcttgcagatgatagtcaatgattcttgacaggagagtaattgcaccacttttctggtggtctcttgacgcaagagaacaaacacactgaaaagaaatggcaagtcaacgtttaaagcaacttctttgtcccttgttgaaaccattctctttctggggtatagacctctaaacccagaactctaacatcttttttgttcgttttttgttttttttttcaagacagaagttttgttctgcttgcccaggtggagtgcaaaggcaggatcgggtcactgcagtctctgccttttgggttcaagcgattctccagcctcagcctcccgagcagctgggattacaggtgctggccccaataccttgctaatttttgtatttttagtagggacggggtttcaccatcttggccaggctggtctcgaacttttggcctcagtggattcacctgtctaggcctcccaaagtgttggcagtacaggtgaaagccactgcacccagcccacaacactaaaatctacaaggatgggaagcccaaagctttcaaatgggcttcgtggatgaaggtgaatgagtgggaatattcccatttcccccatctggatcacaggcccatgtgttccaacttgtagaaatacaggaccataaaatggcattttcctttttattagaggatatgcccagcatgcctcaggctgttgcatttctgaacacttcacagatatggcacatcgctgaaaggcagagacatggaaaatccccatgaccatcaaactcttacacttcagtatagatttgttatgagcagagctaggactacaaggaatgtcattctcaccattggatgtcattggtatcagtgtcgacaggtatgcactttcagcctttggaactcgctgtgtgatccttaggttttcagaaaccttaccatttcctgtccatcagacctggtaatgacattgttatcagtagaatggagattgggctgggtgcagtggctcaggcttgtaatctcagcactttgaggccaaggtgcttggatcacttacgctcaggagtttgagtccagcctgaataacatggtgagagcacgtctctacaaaatatacaaaaactagcccagcatgtcgctgtgtgtctgtagttcaagccacttaggaggctgaggtgagaggatgccttgagcctggaagctcaagactacagtcagcccagatagccccactgtacgtcagcctggctgatggagtaagatgttgtctcatcaacaacaacaacaacaacaaaatttgaatggagaatggagctgtgtattatgttgcagaatgttctgatgggcttggttcctcaggactacttggatggctaatgagagagacgggaagacagagagcttgagattgtgaataaatactgctgttgttctcatgtcaatgccaatattacagatccaccttcctgaagagttttgcaaaacatggattttgcagaccaacaatgcatacagtgtgaccgaggttgtgttatttattgctatggtgagagaaaacatccatcacagctgctacagtggggtcacacctgatgacgtttgcattaccttcctgccatctgccatcatccttctggattttgaagataccagactggtgaattccatgaaacagatgactggacccacagcactggtccttgagtttttgatggtggtgctcatctctgccatctatatacaggaaataatttgccttgagatttgatattggtttttattgattatgttgtcttggatgagcattgatagacttaggctttccatttgcaattgtttttttcctaaaattataagtcatagctcacaggccacaaaaacactgtaagtatttttcctgtttctaagtctatgactcctgattatacatgagagcctaggaacataaccacagaggagagaggttcacaaacagagttcactcacttagaggcagaagttggcaaggaatacatcaatttcctgacccccacccttaggccattactctaacaggggtcatggtgatgtttccaaaccatgggttttatgccaacaaggccttcttggccaagagcttctaaaagacaacaatactcacctttgttcagtgctcagttacctaagcaaatgactgtaggtcttttccaagggaaactggagaattccaaacttgtacaccttccttggttttgcataaacctgcctcatgagaacccagcctctttttgagttaggccttctcgtgtgagaactgtctcagattttaactgtatgaaggatgatgactttctaaggggctgctgacatctgccttctgttcctcttgatgatttctatttcctgttaatgcagggacacacctgtctgccatttatatctgttgtcgctaatgaaacacgctctaagaggtaagtcctagatattgtagggcagtccccccgtgatgtactctggcactggtgtcacctccttatacccccttgcattgatggcaaagtgctggcctctgccattcccacatcctctcaccactttggtgctatggatggagcccatctctgtatcagtgtcccctgctttgagctctgacctatgaagaatgtccagcccttgcatctcagtgatgctggtgtccctctcactggtgcagtggtcatgggcagtctttttttttttttttttttttttttttgagacgaagttttggtattttttcccatgctggagcgtagtggtgtgattacaggcatccagcacaacgccggtctaattttttgtatttttagtagagacaggttttcaccatgttggccaggctggtctctaactcctgacttcaggcgatccacccacctcagcctcccaaagtgctggggttacaggcatgagtcaccccgcccggccatcatgggtagggttcaagatcatagtcagctcctggttctccttctatagtagacccaatccaggatgcccactgattgaggttggagctgtgtccccacccacacctcatatggaattgtaatccccactgttggaggtggggctggctgcgctggtgacagttgagtggattatggaggcggatatttcatgaataatttagcaccatcccataggtgctgtccggtgatggagttctcaaaagatctacttgtttgaaagtgtgtatcacctctcctaccacttgctccagctctggccgtggaagatgagcctgcttcccttgtactttttgccatgactctaactattctggggcctccccagaagttgagctgatggccagcatcatactttttgtacagcctgtggaaccatgacccaattaaacctgagttttataaataattacccagtctcaggtaattctttatagcagtgcatgaacagactaacacatgcacttctcaactatgttattctttaccccaaagctatccatctgtacaatttggatctgagcctaaccacctgcagtgagcccacactcctctggttctgggcatatttttccactagcctaacctcacatccagtgctagccccaatttggcaatctcaggtcacttacactaccctccaacttgccacaaattcaaaagttcccatcactctcagggtgactatggagctagcatcattcacacaactcaaaaaaatcactctgtttgttttacagtgttataacagctaaaatatacaaatccaaagaagccaaagagacaaacaaatagggctgggtcagaaaggatcccagacagatgactccactgcctcctcaaggcagggtgagggggaatgcatctcccggctccactgatgatggtctctttgtgatgaagctttgttcctgggtctcagttgtacatgtcctttggctctaggagaagatgatgctttccaactctcaaacctgatttatttcttatttttttggaagcagaatctcactctgttggccaggtgggagtgtgtgcagtggcacaatcatacctcattgtaacccctaagtccctgactcaggtgatttttttatctcatgctccccattagctagatctacaagtacaggtgcgtgccaccaagcccatctaatttttaagaaaattttgttgtagagatgaggtcttgctctggtgtccaggctggtctggaactcctggactcaaaagatcctacctcttcaagcttcccccgaatctctggattatagatgtgagccaccacatctagtcccaactctcacactttaaattgctgagtgacaggtgacagcctgacttttcctctttcaatgcatcaatggcactcgtttgcagccatccaattccacattcatatcgctattatttacctacaatcttccaaaccaaaagcaatgtaccttcagtgcttctaccgtagttcatccaaaattaccccaggtgaaacatcggtggtttcacagtggtcacatgccctagcgactctgtcctccaactgccagcagtgattgttgctcactgaagtcctgtggggagtcatccaaccccagaatccatacttagggttgacttcccaggaccattgccagtagcaattgatagctcatggtttctagaagcagagcatgagatagggaatcaagatgtgcattgagggagtgctcccgatagctcaggcagggcagctcaaggaaaccaggtaacatcaggtctggctgaagacctgcttaagcctgatcccaagcaggctctggagcacagccttcagcacagaggtggcctcatcttggtcaccctgaggtttctgtgccagtgattccctggctgctagctgttgccaggaagggggtgattaacaaccatctgggccatgtgactgcacgacaactgagtgcaaatctctctaggagaggcacctaccaggtgtgaaggaggatcctggggaagggggtctgggcacagccattcctgtaaatggctttcaggaaacacatgagaatctttgggatgttggaaattaggggtggacattgagagaacaaaatgtccatggaaaatattataaatgtccatggaaagacaaaacgctgggcagaaaggcagtgaaagatcataagggctccataacgtcctccgtgtgacaaagagttcattaagacaagggaggaaccctagaccctgcttaaaaggacgtggcttcagggagagctcctgtgggcacactcagagttgaggtaaaactcctgggattttgtctaattccagtgtactgggtaggggtagacttttggcaatgtgaggtcaggggtatcagatgaaggggtcaacaaatgcctggacaggattcacgaagatgagagggacgttcgaattcctaaaaagctggtggtcaaaagaatgaggatgaagaggagggtgtcctgaaacctcggagccagaagtggggctgaaggcaagaagcctttcaagggaagaagggagtttggaaagagatggatatcaggccagaaaccttcccccaacctggtgccccaaagcattctaaaaacgggggtgggacacagaagaggttgtctgagcagaggaggatcccggaagccagcgtgggggaaggaagagggtatgaggctggcatgaagtggggactagagaaagggtgagtagttttcagagaaaaggccagtgtccagggctgtccaggagcgaatctggtcacttgttctgaaacaggggtccgggtctggcagtggcagcatggtggggtgggtgagtggcactatggaagagccaaatctccacctctatcctcaaagcctttcttccacacagctttccggttagcaaggctccatgagaatggttagttcctgaaaatagtggaccccagaagggctgactaggagcgtgggcatagggagagggaggggatccagggcccggaggaccttgccagagcgtgtagcccgcagaattgaggaaacgagagtgggggtggggatcagatcccagcatttatggagtgactgcagcccagaaaggtggaaaaaactaagaaggggaccccaagggcttgaaagaccttgccgagtgtggagccctgaagtgcgcaggccactcggttgtccctcaggggcctgggaacctcgcggagtgtggagtctctagaacgcagtccactccgctggggaggtggatttcaggccagaaaccttcagggacctggagccccaacacatgctaaaaacaggggtagggacacagatctgaaagattttggagtacttggaaggcagaagggaaacttgaataagtcagggtggagcgctcagaagatggcggagacagccgagctggaagaatccagaaagagaggcggggacaggggatgggggctcagacgcattcagagcgcacagggcccctccaaggtcgctttcacactgccgggttttcctctgcggctgcagagctgcacttttcctctgtcccaaccaaaatgtgacccttgaaggtctcatcccccatggactgtatctgggcctcatttattcaggggcctcagtcctcaaggaggccattgtcactctccttcccgatagagtcctctcaaattagtaagggcccctcaaggagcccagggtttgtctttatccctccctgaaacttcttcggaaggaggaagttcccaaacacccccaggctttagtgccagaatttcaccctctgaaacctcctccttccctagacccagtccggctcctcatcctcagtccctcagaccccatggaggtgtcccctgcagtgggttttctccagattgagagcctcccctcctcagcacacaacccagagactcaccctgttctgagcagcgagccaccgcataagcagacatgagacctcactccagtcaaataacactttatttttgtaaattcaattgttttgttcccggaggaaagggaggagctcaggagaacagtgtcgtcaaaatttcctggtggttgtttaatcacagccgccgagtaggtcagaaaactcatccggattaccctcttcctcctgaaattaaaggaaatgtgcaggactcatcaactggtaaggtttcgtgacaattgtgcgaatatcgtgctggatatatgaatagaaagttaaatctgaacgacctgtgctgcttgtccagacatcatcttcttcaggaaatatgagatgtttctgaagagtttcagcagcttgtcaggaaaggactctgccttttccagtacatagatgagcatcatctggattagagacctcaacacggcgaatacaatttccgttgctagttttgggacacatgtcatgaattggtcggcacaccatttttctaacatatcggtcagaatactggccactttaggcactatctcttccttggccaggttctttataagtgaaataaatgagcccatgatatgtgcaatgagcgtgctgttggtttcaggcaaagttatataatgagagcgttcctggagagtggaggcattttacagaaggtcacgtggtgggggcgggccaagatggccaattagaagcagctgccttccactgagtgaaaagaaaagcccggggatttttttttttttttttttttttttgagacggagtctcgctctgtcgcccaggctggagtgcagtggcgggatctcggctcactgcaagctccgcctcccgaagcccggggattttgaagtcagcgcgtcaactgaaatattcaggttctcacattgggactgactaggcaaacaacttgacccgggagaacaaagaaaagagggatggatgatgattcaccctgtattggcagagagccaaaggaaccatctccggcatccgagggaaacagtgactgagcgtgtgaccccgccccagaaaccatgcttctcccatggatctttgcaacccatggatcaggagatcccctcttgagctcaggtcataagggccttgggtccaggacacagggctgtgtggagtgttggcagagcagccgctcagacacacatagagacccaggagtttcacatactctggccttgggatgccgggaaaggtgggagttccgtctatacattcccccaggaagggggctgaattcagctgctttaggagtttttaaaacattattttaggcagacagagaggaaaaggggtccttgggaagttttgtttctttttaaagcagttccagaaaagagtcttgtctagcaggaaagccctggcttttagagttctctggtaagctttgattggcaaatgctggccattagaaactgggtccgcccaaacatggggattcccgcccgcttctggcccttgcccctccctgtgtacacaccctgtgatattgggagtaatataatcctctcccctcctgaatattacgaacaatatcacaggggattttacaccttctgtgatattgggaataatagcatcctctcctccttttatattaggaacaatatcccagggggtgtgtacaccctttgcgatattgggactactatcatcctcttccccactggatattaggaacaatatcaccggggggtgtacatgtcctgcaattttggaagtagtatcatcctctcttgccttttatattacaaacattgttacaaagggatgtacatcctctgcgatattgaaagtaatatcatcgtctcccccattggatattatgaacaatattacaaggaggagtacacacagggtgttaattatattgggagtaatattatcctctccccccttaatattacaaacaatatcacaggagggtgtacaccccccatgatcttgggattaatataatcctctccctccttggatatgacaaacgatatcacaaagtgtgtgtacaccccatgcgatatgagaggtagcataatccaagagaggattataatatctcttggatatcaggaaccatatcacaggggaatatacaccccgtgtgatatggggagtagtagtatcctctttctccctgaatattacaaacaatataacagggggatgtacactctccgcgatatggaaagtaatatcatcctctcctacattggatattatgaaccatatcacaggggggtgtacacccactgcgatatggggagtagtatcctcctctccacctttggatattatgaacaatatcacagaagggtgtacacttcctgagatattcggagtaatatcatcctcttttcacctggatattatgaacactatcacagcggggtgtacaccctctgtgacatggggaataatataattttctcctcccctggatattaccaaaagtatcacaggggggtgtacatcccctgtgatatgaggagtagtatcatcttctcctcccctgaatattaggaacaatgtcacagaggggtatacaccccctgcgatatgaggagtaatatcatcctttccacccttggatattatgaacaatatcacagggggtgtacacacaggttgtttactatattgggagtaatatcatcatccccctctatattataaagaatatcacagggggttgtacaccacctgcaatattgggagtaatatcatcccctccccctctggatattatgaacaatatcactggggactgtatccccccaagatattgaagataatatcatcctcttccctttggatattacaaaccacagagaggtgtacaccccctgcgatatggggagtaatattaacctctccttccctggatattacaaaccatatcacatgggggagtacacaccccgtgatatggagagtaatgtcaccctctctcttcctgaatattatgaaccatataaaaacccctgcgatatggggagtaatattaccttctcctcagcttaatattaggaaccatatcacaaaagggtatacactccccgcgatatggggagtaatatcacccagtataccccctggatattacaaaccatatcacatcgtggtgtacgcctcccatgatatggaaagtaatatcaccttcccccttcatagatattacaaaccaggccaggtgcagtggctcacgcctgtaatcccagcactttgggaggccgaggcaggtggatcatctgaggtcaggagttctagaccagcctggccaacatggtgaaaccccttctctactaaaaatacaaaaagtagccgggcgtggtggtgtgcgcctgtaatcccaacttcttgggggaccaaggcaggagaatcgcttgaacccgggaggctgaggttgcagtgagccgagatccggccatcatactccagcctgggggacaagagcgagacttcgtctcaaaaaaaaaaatgtagatattacaaaccatatcacattggggtgtatgcctcccgcgatatggggagtaatatcaccctctcctccctgggatattatgaaccatatcacataagtgtgtatgccccactcgatattgagagtaatgtaaccctctccccaactcagtgtaacaaaccatacaacagggggttgtacacccccagcaatatggagattaatatcaccctctcttcttctggatattatgaatcatatcacaggcgatgtacatgccccgagatacagggagtaataccaccttattccaccctggatattatgaaccatatcacagaggggtgtacaccccccacgatatgggagtaatatcaccctctccccttttggatattacgaactgtatttcacgggagtgtacacccttggcgatatggaaagcaatatcacctctcttaacctgaatattatgaaccatatcacaggtgggtgcacacccaccacgatgtggggagtaatgtcaccctctccttctctggatattactaaccgtataacacctccttcgatattgggagcaatattaccctctcccctcctggatattacgaaccatattcaaagggtggtgtacattccctggaatatggggagtaatatcaccctcttttcttctggatattatgaaccatatcacaggggagtgtacgccatccgagatacagggagtaatattactctctcccccgctgaatattacaaaccatatcacagggtggtgtgtgttccccgcgatatgaggagtaatatcaccctcttttcttcgggatattatgaaccatatcacagaggggtgtacgcccccgcaatatgggaagtaatatcaccctctccccgtctggatattacgaatcatatcacagaaaagtgtacgaccccacgatatggagagtaatatctccctctccgcccccgggatatcacaaaccatatcacaggggtgtatatgccccccgcgacatggagagtaatatctccctctcccctccgggatattatgaaccatatcatagtggggtgtatgccccacgtgatatggggagtaatatcaccctctccaccccaagatattatgaaccatttaacggggaggggtgtatgccaccgcgatatggggagtaatatcattttcttcctcctgggatgttacaaaccatatcacgtgggggtgtaccctgatatgtaacgtgatatggggagtaatagtaccctctccccccggggatactgtaaaccatttcccagggaagtgtacaccccccggtgatatagggagtaatatcaccctctccaccccgggatattgtgaaccatatcactgggagggtgtagcccccgcgacagggaaagtaatatcattgtctcctccttggggtatttcgaacatgtcacgagggtgtgtaacccctcactcggtatgtggagtaatatcaccctctccctccctgtatattatgagccatatcacacccaggtgtaggcccccggtgatatggggagaaatatcaccctctcagcccccgggatattacgaaccatgtcacaggggagtgtatgttccctgcaatatgaaaagtaatattgcactcttttccctgaagtattactaaccttgccacagaagggcgtatgctcttcgctgtatggggagtaatattaccctctaccccctcccccaccgggatatttcgaaccatgtcacaaaggagtatatggccctcgcgatatggggagtaatatcacactctccccccaaggatattatgaaccatatcacaggggggagtactccttcgcgatatggagagtaatatcaccctatccaccctgggatattacaaaccatatcaccaggggatgtaaacttcccgtgatgtggggagtaatatcaactccttcccttaagatattttgaaccgaggcggaagtaagggtgagaggaggctgcaacgccgatcggaggaggcaggaaccggagctctagcagtagctgggtgggcaccatggctgggatcaccaccatcgaggcggtgaagcgcaagatccaggttctgcagcagcaggcagatgatgcagaggagcgagctgagcgcctccagcgagaagttgagggagaaaggtgggcccgggaacaggctgaggctgaggtggcctccttgaacgtgggatccagctggttgaagaggagctggaccgtgctcaggagcacctggctactgccctgcaaaagctggaagaagcggaaaaagctgctgatgagagtgagagaggtaagaaggttattgaaaaccgggccttaaaagatgaagaaaagatggaactccaggaaatccaactcagagaagctaagcacattgcagaagaggcagataggaagtatgaagaggtggctcgtaagttggtgatcattgaaggagacttggaacgcacagaggaacgagctgagctggcagaatccctttgccgagagatggatgagcagattagactgatggaccagaacctgaagtgtctgagtgctgctgaagaaaagtactctcaaaaagaagacaaatatgaggaagagatcaagattcttactgataaaataaaggaggcggagacccatgctgagtttgctgagagatcggtagccaagctggaaaagacaattgatgacttggaagataaactgaaatgcaccaaaggggagcacctctgtacacaaaggatgctggaccagactctgcttgacctgaatgagatgtagaacgcctcagtctcaccctgctgctgctcctccctctgaaccagactccgcctgaggccagcctgcccgaagctgacctttaattgagggctgatctttaactggaaggctgctttctcctttcgccgccccctccttccgccgcccgctccttccctgtgtctttttcaccaaactgtccgcctcttcccggagattccagctgggctagaggctgagcacctttggaaacaacatttaagggaatgtgagcacaatgcataatgtctttaaaaagtatgttgtgatgtacacattttgtaattacctcttttgttgttttgtagcaaccttttgtaaaacattccatataataccacagccctgaagcagcgatcgaatccctttctcacttttggaaggtgacttttcaccttaatgcatattcctctctccatggaggagaggaaaaggtataggcctgccttgctgagagccaaacagagcccagggagactccactatgggaagcctcattgctctgtacaaagtactagctaagccagaaaggtggttccaggaggagttagccaaacaacaacaacaaaaaatgtgctgttcaagttttcagctttaagatacctttggataatgttatttctattttttatttttttcattagaagtgaccaaattaagatggcaagacctctgagaccaaaattttgttccatctctaccccctcccaactgcttacagaatggatcatgttccccttatgttgaggtgagcacttaattgcttttcttgcctccttgaaagaaagaaagaaagaaagaagattgtgtttttgccactgatttagccatgtgaaactcatctcattacccttttctgagtttgaagctgctgtctctacaagtgccatctcattgtgctttgtatcagtcagtgctggagaaatcttgaatagcttatgtacaaaactttttaaattttatattattttgaaactttgcttctttgggtttgtggcaccctggccaccccatctggctgtgacagcccctgcagtccgtgggctggcagtttgttgatcttttaaagtttctttccctaccctgtccccattttctggtaaggtttctaggaggtctgttaggtgtacatcctacagcttattggcttaatatgtactctcctttgatgtggtctacttggggccgattgggagaaagagaaatcaatagtgcaactgttttgttaatgaatattgacaagtgtctttttgaaataaagaaccagtccttcaaaaaaaaaagacattttgaaccatatcacaggggggtgtatgtccctgcaatatggggagtaatatcactctctcccctctgggatattacaaaccatatcacaggagggtgtacgtccccacaatatggggagtaatattaccctctcctccctggatattatgaaccaaaccacagggggcttatgccacccgcgatatggagcataatatcttcctctactccccggaatattatgaactgtatcacaggggagtgtatgcccttcacaatacgaagagtaatattaccctctcccccatgggatattacgaaccatgtcacaccccttgcgatatgggaagtaatatccctgtctttccttccggatattctgaaccatatcacagggggatatacaccccctgggatatggggagtaatatcgttctccttgggccatgcgtggtggctcacatctgtaatctcagcacttttggaggccgaggcggatggatcacagggtcaggagttcgagatcagcctggccaatatggtgaaaccccgtctctaataaaaatacaaaaattagccagacgttgtggggtgcgcctgtagtcccagctattcaggaggctgggagaggagaattgcttgagtccaggaggcgggggttgcagtgagccaagatcgtgccactgcactccaacctgggtgacacagtgagactcaaaaaaaaaaaatcattctcatttccccccctggatattacaaactgtttcacaggtaaatgtagaccacctgcgatatggtgagtaatatcaccctcctctccttccctggatattacagaccatatcgccgggggtgtactccccctcccgtgtacacccccggcgatatggggagtaatatcactctcctgtttccttttggatattatgaacttgatcaaagagggatgtactcccaccgagatatggggagtaatatcaccctcctcatccccctggatattccaaaccatatcacaggggggtgggcaccacccgcgatgtggggagtaatatcaccctctcttctattacaaacaatattacaggggtatgtacacttcccgcgatatggggagtaatattaccctcacccaccctggatattatgaaccatatcacaggagagtgtacatcccccaagatgtggagagtgatagcagcctccttccccaggatattatgaaccataacacacccccggcaatatgaggagtaatatcaccctctcccgacctggatattacgaaccatgtcacaggagggtgtacatgccccgagatatggggagtaacattaccctctcctcccctggatattacaaaccatgttacaacccccgtgatatggtgagtaatatcacccactatatcccctagatattacaaaccatatcacaggaaggtgtacgccccccacaatatggggagtaatatcaatctctccccttctggatattacgaaccatatcacagggaagggtatacctcccatgatatgggaagtaatatcaccctctccaacttggatattatgaaccatatcataaaggggtgtctgcacccagcaatatggaaagtaatatcaccttttcctcccctagatattacaaaccatatcacagggggggtgtatgccctctgcaatacggggattaatatcaccctcttcttttctggttattatgaaccatatcacaggggttgtatgtccccccgcaatatggggaataatatcaccctctcccccctggatattaggaaccatatcacagggaagtgtactcccttcatgatatggaaacgactcctcctctgccccctggatattactaattataccacagaagagtgcacgccccctgattatcacacctcccaagatatgtggagtaatatcatcgtcctctacccttctggatattatgaaccatatcacagggggttgtacacccttcgcgatatgaggagcaatatcaccctcctctctcccctggatattatgaactatatcacaggggagtttacaacacccgcgatatggggagtaaatatcactctcctctcccccgcctggatattatgaaccacgtcacagggcgtgtgtacacttcacttcaactttttcccttaagttgtacacatcaacttcttcctttgagatactatgaaccagatcacgggggtgtatgctccccgcgatatggggagtaatatcaccctcgccccccaaagatattacaaaccatatcacagggggctgtacgtctccacaatatggggagtaatattaccctctcccccctggatattataagccaaaccatagggggttgtaggccacccgcgatatagggcatagtatcttcctccactctccggaatattatgagctatatcacaggggggtgtatgcccttcgcgatatggggagtaatatcaccttctcccctcgggatataaagaaccacatcacaaaaaagtggacgccttccacgatatggggagtgatatcaccctcatctgcccccctggatattaccaaccacatcacaaaggggtgtacacccccccgatattgggagtaatgtcaccctcctttttcactctggatattctgaaccatatcacagggagttgtacaccgcctgcgatatgaggagtaatatagtaatagcatcttctccacccctggatattaggaacaaaatcacaaggaaagtgtacattccctgcgatattgaaagtaaaatcatccttcccccatattgcatattagaaacaatatcacagctcgggtgtataccccctgcgatattgggagcaatatcatcctctgcctcctggatattagaaaaaatatcacaagggggtgtatacgactcctgagatattgggagtaacatcattctctcccaccctgaatattaggaacaatatcacaggggggtgtacaccctctccaatattgagagtaatattatcctgccaccccaccccccagatattaggaacaaaattacagggaaaatgtacgccctgtgatattggaaataatactattttttatttctctggatattaggaacaatatcacggggggtgtacaccctctgcgatattgggaataatattatcctctgcccccctggatattggaacaatatcaaaggggggtgtacacccctgtcaatattaagggtaatatcatactctccctttcctgatattaggaaaaatatcacaaaggaggtgttcacccctgcaatattgggagtaacatgattttctcctctactggatatgagaaacaatatcacaggggtagtgtacacgctcagtattgaaagtaatatcatcttctcactccctggatattagcaacaatataacagggaaggtgaacacttcttgcgatattgtgagtaatattatcttctactccgccggatgtaggtgtacatcccctgcgatattgggagtaatatgattctctccccctctgggtattaggaacaatatcacggagtggggggagacaccacccgcgatattgggagtaatattatcctgtcattctcctggatattaggaacaatatcataagggagtgtacacctcctgtgatattgatagtaatatcaccctcattttccctagatattagaaacaatatcacaggttggggtgtacaccccctgtgatcctgagtgtaatatcctctccctccctggatattggaagcaatatcacagaaagggtgtacagtctttgcgatattgggagtaatatcatcctctccctcatggatattaagaacaatatcaaagaaggcctgtacacaccctgtgacattgggagtaatatcatcttctcttcctctggatattagaaacaatatcacacggagggtgtatagccctgggatatttggagtaatattatcctctcccaccctggatattaaaaacaatatcacagtgggggtgtaatccccctgcgatattgggagtaatatcatcctctccccccagatattagaaactatataaaaagaagggtgtacaccccatgcgatattggaaggaatattattttctccaaccttgaatattaaaaacaatatcacagggggctctacaccccctgctgcaatacagtgagtaatattaccctccttcgtcctgaacattaggaagaatatcacaaggggagtttacatctcctgtgatgttgggagtaataccatcctctcctccactgcatattagaaacaatatctcagggaaggtgtacacccctgcgatattgggagtaatataatcatttacccctctggatattaggaacaatatcacaggacaggtatacatttcttgtaatattaggagtaatatcatcctctttccttctggatattaggaaaaatatcacagggggagtgtatgtccccttcgattttaggagtaatattatcttctccacccctggatattagaagaaacaatatcacatagggttgtacagcccctgcgatattaggagtaatatcatctcctttccccctggatattaggaacaatatcaaagggaggttgtacaccttctacaatatttaaagtaatatcatctcctccgctggatactaggaacaatatcacaggaggtgtgcacaccccctgcgatattgagagtaatataattttctcccatccttgatattagaaacaatatcacggggagatgtacacccattgtgatatgtgatattaggagtaatatcattttctcccttcctggatattaggaaaaatatcatagtgggagtgtaagttccctgcgattttaagagtaatagcatcccctccccccctggatattaggaagaatatcacagaagcgatgtacaccccctgtgatattgggattaatatcatcctctctcttcctggatattaggatcaatatcacagggaagtgtacacaccctgcgatatttggagttatattattcttttcctttttgaatatgagaaacaatatcacagggccgttggacaccccctacaatattgcgagtaataccatcctctcaccgctggatattagaaacaacatcacaaggggctgtacaccttctgtgatattgacagtaatatcatcctcttctttcttagatataacaaacaatatcacaggaggagtgtacacccactgttgatattgggagtaatattatcacagggcgtgcgtgcaacccctgcaatattgggagcaatgtcatcctctcttactctggatattaggaacaatatcacggggggtgtatacagcctgcaatattgggagtaacatcattctttgcctccctggatattaagaatgatatcatggggggcctgtacaccccctgcgatattgggagtaatatcagcctttcaccctttggatataaaaaacaatatcacggggatggtgtacaccctctgctgtatttggagtagtagcattcttttctccatgaatattaggaacaatatctcaggaggagtgtacgtcccctgtgattttgggagtaatattatcctctccccctggatattagcaacaatatcacaggggtggtgtacaccccctgcgatactgggagtaatatcattctctcctttcctggatgttaggaataatatcacaaagaggatgtacaccttctgtgatattgggggtaatatccttacccacataaatattaggaaatatatcacaggggggtgtacatatcctgcgatattggaagtagttcattctttcccgcctggatattatgaacagtatcccaggggtgtgtacactctgtgatattgggggtaatgtcatcttctacccccctggatattataaacaatatcacaggggatgtacacacaggatgtttacgttattttgagtaatatcatcctctccacccctggatattacaaacaatatcacagggaggtgcacatcccctgaaatattggcaattatatcatccttttctcccctggatattacgaacaatatcacaggggggtgtacaccccctgtgatactcggagtgatatcatcctctccttttctagatatttcaaagaatatcacagggaccgtacaccacctgcaatattgggagtaatatcatcctctccttttctggatatgatgaacaataaatatcactagtgggtggacacccccggtgatattgggagtaatgttatcctgtcttcccctggatattatgaacaatatggcaaaggggtgtacactccctgggatattgggagtaatagcatcctctttcattccggatattgggaacaatatcacaggagagtgtacacccccttcgatattggaagtaatattatcatatttttttcctgtattttaagaacaatatcatcttctccattctgaatattaccaacaatattacagggggatgaacgtcccctgagatattaagactaatataattttctctccccctagatattacgaacaatatcacagggggttgtactccccctgctatattggaaataatagcattctcttttcttcttggtattacaaacaagatcacaggggggtgtacactccccacgattttgggagctatatcatcctttccccctctggatattcggaacaatatcacagggagtgtgcaccccctgcgatattgggagtaacattatcctctccccagagcgcctctgcccggcctctgaaccgtctgggaagtgaggagcgcctctgcccggcagccccaccatctgggaaatgaggagagtctctgcccggagtccaagtgtctgggaagtgaggagcgcctctgcccagccgccccactgtcagggaagtgaggagtgcctcagctcggcggccacaccatctgggaagtgaggagcacctctgcatggccacaccaccgtctgggaagtgaggatcgcctctagcctgccgccccaccatgtgggaagtgaggagcgcctctgctgggccgccctaccctctgagaagtgaggatcgcctctgcccggctgccccaccatctgggaagtgtggagcgcctctggcttgccgctgctccgtttgggaagtgaggagtgcctctgccaggcctgcaaaccgtctgggcagtgaggagcacctctgcccggcagccccctgttctgggaagtgaggagcacctctgcccggctcctgcaacatctcggaagtgaggagcacctctgcccggctgcctcaccgtctggggagtgaggagcgcctctgcccggccactgtgcaaccctccaattgtgaagtggcagccttctgtttgatctttctgcccttctcaagtttgcatttttgacattaaagtttacttttaaaataaaaaaattatcttctccccttctggatattacaaacaatatcacaagaaggttacaccccttgagctattgtaaggaatagcatcctctccctaccttgatattacaaacaatatcatatggggctacacaccccctgtgatattggaagtaatatcatcctctccccttctggattttatggacaatatcacaaaagggtgtgcaccttctacgatattgtgagtaatatcatcctctacccccctggatattatgaaccatatcatatgggggtgtacacttcccaccatatggggagtaatagcaacctctccccttccggatattacgaaccatactacagggcggtgtacaccctccacgatatggggagtaatagcattctctcccgtcgtggatattacaaactataccacaaagaggtgtacactccctgtgatatggggataattacaccttctctccctccttgattttacgatccgtactacaagggggtgtacactccccgcaatatggggagtaatagcacctactcccccgctggatattaggaaccaaaggggggtgtacacccctctctataaggggagtcacagtgtagcaggaggagccgcggacaaaatcccacagacaccgaggtagtgaaggaagtggcttttaatcagctggaagcatcagcagactagagtatcaaaatccaagcttgttgagtgcacaatttctgtcctttttaagggctcacaacactaaggtttttacatgaaagggccatgattgattgagcaatctagtgggtatgtgacaagggctgcatgcaccagtactcagagtgaaacagaacagaacaagaaatttcacaatgtccttccatacaatgtctggaatctatggataacatcagttgctaggtcatgggttgaattttaactttcaggctaaggtcaggaaggcccaggcctggtttcgggtctggttttggatctggtgcctggcgccgggctgcctgcctttggtttcgcttccttgtttcttcttaaaacaggtactgagtataaaataatacagaacaatatggggggggtcttttgctctcttctctcaatagcaccccttacctgggatattacaaaacataccatagaggggtgtacgcctcctgcaaaatggggaataatagcaccctctcttaccctggatatttcgaaccataccacagggaggtgcactccccccgcgatatggggagtaatagcaccctcaatcccctggatattgtgaaccgtaccacaggggagtgtacatttccagcgatatgaggggtaataacaccctcttcgttcccggagattacaaaacataccacacgggggtgtacacaccccgcgatatgggaagtaatagcatcctctttccccctggatattaggaaccgtaccgcagcagggtgtacatgcctcgcgatatggggaataatagcaccctttccctccctggatattatgaaccataccacaggggggtgtacaccccttgcaatatggaaagtaatagcaccctctttccttctggatattaggaaacataccaaagaggggtgtacaccccctgcgatattgaaagtaatattatcttgctcccttctggatactaggaacaatatcacaggggagtgtacatgccctgtgatgttttgagtaatatcatcctctcccctttgaatgttaggatcaatatcacagggaggtgtacacgttctgcgatattgggagtaatatcatcctctacttttctggatattaggaacagtatcacagaagatgtgaacactccctgctatatatccagtaatatcaacctctcccctcctggatatcaagaataatataaccggggggtgtaccccacctctgatattggaagtaatatcatcctctctccctctatatattatgaacaatatctcagagagggtgtatgccccctgcgatattgggcgtaatatcatactctcttcccctggatattaaaaacaatatcacagggggaataggcaccacctgagatattgggagtaatatcatcctctcccttaaaggatattaggaacaatacataggggtggtgtacacctcctgtgatattataagttatatcatcctctcttcccccaaaatattaggaacaatattacaggggcgttgtacaccttctgggatatggagagcaatgtcatcctcttttccattggatattaggaacaatataaaaggggggtggacacaccctgcgatattggcagtaatatcatcttttccctcctggatattaagaaaaatataacaagagaggtgtacacttcctgcgacattgagagtgatatcgtcctcccccgcatggatattaggaacaatatcacaggttggtgcacaccccctgcgatattgggactaatatcatcctctccccgcccgaatatttggaacaatatcacaggggggtgtacacccccctgcaatattgagagtaatattctctcttcctgtggatattaggaacgatatcacaggagaggtgtacacaccctgagatattgggagtaatattttcatctttccttttgaatattaggaacaatagcagggtggggtacacaccctgtgatattggcagtaatgtcatccttcttccccctgggtattagaaacaatataacaggggaagtgtacaccctctccgatattgggagtaatatcatcctcttccctgctggatattaggaacaacatgacacggtgggtgtacacttcctggaaaatgggattaatatcatcctctttcttcctggatattaggaacactaccaaaggggaagtgtaaccccctgcaatattggtagtaatatcatcctctttttccctgattattatgaagaatatcacagcgggggtgtacaatttctgcgatattgagaataatagcatcctctcctccctccccaaatactagaaacaatatcccaggataagtgtacaccctctgcgatattgggcataatatcacactcttttcccctggatattagaaacaatatcataggtggggtgtacaccccctgggagtaatatcatcctcaccacttctggatattaggaacaatatcacaggaggtgtgtacaccccttgctgcaatgggagtaatatcatgtaccttccccctggatattgaaaactataccacaggaaaggtgtacaaaccctgtgatattgaaagtaatattatcttctttccccctgagtattaggaacaataccacatggggtgtgtacaccccctgccatattgggagtaatattattttcccctcgcctggatataaggaacaatatcacaggaggggtgtacacccccagcgatattgaaagcaatatcatctcctcccctcttgatattaaaaacaatatcaccggaggagttcacacccctgtgatatggagactaatatcattttctccccaccgaagtattaagaacaatatcatgggggggtgtgtacaccttttgtgatattgggagtaatatcatccttttccaacctgtatattaaaaaccatatcacagggggtgtgtacaccccctgtaatattcacaataatatcatcgttttcttccctggctattaggaacaatatcacaatggtggtgtacaccccctgtgatattgggagtaacatcatcctcttcccttttggatactgtgaacaatcccacaggggagaggtacaccccctgcgatattgggagtaatatcctctcccgtcatggatattaggaacaatatcacaggagcggtgtacaccccctgcgatattgggagtaatatcattttctcccaacctaactagcacaatatcacagggggtgttcgccccctgccatattgagagtaatgtcatcctctcccctcctggatatgaaaaacaatatcacagtggggccgtgcaccccctgcgatattgggagtaatatcatcctctctaccccctggatatgaggaacaatattacaaaggggtgtacaccccctggaatattcacagcaatatcattgtttcccttcctggatattaggaacagtatcacaaggggggtgtagacctccagcgatattgggagtaatatcatgctctctccttctttatattagaaacaatatcacggggaggggtgtacaccacctgcgatatcatcctctttacccctggatattaggaacaatatcacttgtggggtgtacttctcctgtgatatcgggcataataatatcctctcccccctgaatattaagaacaatataacagggggacagcacaacccctgtgatattgaaagtaatatcatcctctgcttccctgaatattaggaacattatcacggggggggggggtgtacactccctgctatattgggagtaatataatcctctccctccctgaatattaggaacaatatcacaaggggggtgtacaaccccttctatatgagaagtaatatcatcctcttccttcctttatatatatttttttccattgaaagttgtttatttctctgatgtaagtgagctaagtcactacagcattaaaatctcttttctagaacaacgtaaagaacaatgtatacacatcttaaatttggtaggtcacaaaagttagaatgcaatcatcttttgaggcaacaagaaaataaataaataaaaattaaacactttaacccaaaatttggtattgacaaatcagtagtgtcaacttcacatatgaaggacaatacagtctggttatttaaagatgctcaatatgtcatggtatttgggctaaagatacttagaatattgcgtttcctttttgattaaaggaatacaatgcaatcaccatcaagctgctatcataactcatttttagctgtggtaaagtgaccatttggtccatggcacaagttacatatatcacacttctgtcaaactgaaaccttgtaagatttcatgtttataagctacaatacaccctgaccaagctgtcagtcccctcacggttttttagaaaaatatctacatttgtccttatggatgtcaaaatgttacaccatcatttgttaaaaaaaaaaaaaaaagatgcacattcatactgtgaagttattaggaaaatactcttgcaaacaaactatataaagataaaacacgcttcaaaagtatgtggtttgttttcttgtttgtctgttttacaatattctataaagtgcagagtcctaagggaaaaaactactccctataacaatagttcaattacagcagcttttgcatagcaatacttagagaaagttggacactacagtttcttcaggaagagaaggatggaagagtatcttctgattcagattgttttttggccataagtctgctttcttcaggaatggttgctgatgccaaatctccgttaagtgtattttatgaacagtgaacaggtctatctgggtcttcaagaggaatatcactacaagaatctgtatctgagtaggttcttcggcgtcgctgggagagtcggtgaagtgcagatactggttcttttatacagtggctactcctccctggtgcaagaaccagggtggctgacagaacgcttcctcatttgaacaggagaaggtgacacaggagaaactaagggatccggatggtgccgttgaaacatctcaggtttaaacctggcattggctatcttcacacattcctcaagcgttgtgatgaacgtgttacacgtggcactaagcagagaagaggcttcattgatgttctctgcactaggagatgaatgattctcatcgtggtgaacaaattcctgtatcgtatgaacttgctgcattaagaggtcacagtagaggcgaagttcagacattttggttttcagcgattcactggtttcacttctttctttttcgtttttagtccttgtatcagtcaaacatgctttggagctccccagagcgaccagccacctctgtctttcagctgcgttcactgccttcatgtagaaatgctgctctccaggaatgattaattccattcttgtgttgtctgctgaatgaacagaatttatgtatccaatcaagggtggtcccctccaaagctgtcacctttaatttcacaaactgccatctttatgcttcctttgctccctttgcaaacatcatcttgtgaatcataataggataagattccattatctaaaacaaaccaacgaggctgccaacctgtgagatagttggtccacttgtacaaaaccccctccatgcttcagagccccacaccgctcatcctcccggcccggcgccggccgcggtgatggggtaggcgcggggcctggggcagcctttcccggcccgcccgggccccctccgccggcacgaagccgctttctgcctgcgcgcgccgcagggacgtggcggcccttagaggccgggacagcgggcgcagcgtggagcttgggggccgcgaggcgcgggctcagacatccccgggtaagcctcggcggcggcggccgcgacaacggcaaaaatgcgactgcgaccgcgaccggtctcgtgctcgcgcttccgcggcccggctgctccctccggcgccccggcgctgcctcttcctcgcctgccttccttccccctgggctccccgtttgtttttcgaccttcctttatattaggaacaatatcacaagtgggggtgtacaccccctgcaatattaggagtaatattatcctctctttttctagatattagaacaatatcacaggggaagtatacattccctgtgatattgcgagtaatattctctctctcttctaaatatttgcaacaatatcacagaaaaggtgtacaacccctacgatattgggagtattactattctcttccccctggatattagaaacaatattacaggttaaatgtacacttcctgcgatactgggaggaatatcattctcttttgctctggatattaggaacaatgtcacaagggggatgtacactctctgagatattgaaagtaatttaattatctccccccgcccccggctattaggaacaatatcacagggggcggtgtacaccctctgcaatatttagagaaatataattctctttcccctcgatttcaagaacaatatcacaggggatgcgtgtacaccccctgcgatattgggagtaatatcatcctctgtccctctaaatattaggaacaatatcatgggtggtgtacacaccctgcgatattggcaataatgtcatcctctccttttctgcatactaggaacaacataatgggggagtgtacacctcctgcaatattaggagtaatatcatcttcttccgccatggttattaggagcaatatcacagaaggttttataacccctgtgatattgggagtaatatcatccttccccccacgtatatcccagccttgatattaggaacaatattacaggggaggtgtataccccctgctataaggggagtaacataatcccctttcttcctggatattaggagtaatatcacccgttttccacctgaatattagaaacaatatcatagggaaggtgtatatcccctgagacattgggagtaatattattttctcctcgcttggatattagaaacaatatcacagggggtgtgttcaccccctgcgatattgggagtaatattatcttctctcctgcggatattaggacaatatcacaaagggggtgtacactccctggaatattcacactaacatcatcgtttacttccctgaatattagggacaatatcacaaggggagactacaccccctgcgatattgggtgtaatatcatcgtctcccccatggatattaagaacaatattatcggaagtgtgtacactctctgcgatatttggactaatatcattttctcccaacctaaatattaacaacaatatcacgggggtgtacagcccctgcaatattgaaagtaatattatcctcttccccctggatattagtaacaatatcacgggggaggtgtacaccccttgcgatactggaagtgatatcatcctctcccagtcttgatattagaaacaatgttacagggaggcgtataccgtctgctataatgggagcaatatcatcctctttcttcctggatattaggagaaatatcacaggggttgtgtacaacccctgcgatattgaaagtaacatcatcttctttccctctgaatattaggaacgatatgatggggaaggtgtacaccccctgcggtattgagagtgatatcattttctcctcgcttggatattagaaacaacatcacaggaggggtgtacacccactgcgatattgggagtaatataatcctctcccacccctggatattaggaacaatattagaatattaggaaggtgtacactccctggaatatttacagtaatatcatcctttccttcccaggatattaggaaaaatatcattttctcccaacctaaatattaataacaacatcatagagggtgtacagcccctgcaatattgaaagtaatatcatcctctacctccctggatattaggaacaatatcacagggcatgtacacctcctgcgatattgggagtaatggcatcctttcccatccttgatattagaaaaatatcagagagggggtacacactccctgcaaaaattgaaagtaatatcctctccaccgctggatattaggagcaatataacgggggagggcctgtatacaccctgcaatattgggagcaatattattttctccttcactggattttaggaacaatatcacagtgtgggtgtaaaccccctgcgatattgggagtaacaacatcctctttccccatggatattaaatacaatatcacaggaggggtgtacactctcttcgatattgggagtaatattcttctttcttttccttgatgtaaggaacaatatcagaggggggtgtacaccacctgcaatattgggagtaatatcatcctttccctttctggatattaggaacaatatcacaagaaatgtgtacactggctgcaatactggaagtaatataatcctctcccttcctggatattagaaacaatatcccaaaagggatgtacactcccagcgatattgaaagtcatataatcgtctgcttccctggatattatgaagaacatcacagggtgggtgtccactttctgcgatattgagagtaatatcttcctctctcctcctgaatattacgaacaatattgcatggaggatgtacctcccttgcgatattgggagtaatatcctcctctctcccccttgatattaggaacaatatcatgggggagtagtgtacacatcctgcgatattgggactaatgtcatttccccccactcggatcataggaacaatgtaacagggaaagtgcacaccccctgtgatattgggggtaatatcatcctctcccgccctggatattaggaacaatatcacagggcgttgtactccttctgcgattttaggaacaatatcatactgtccccttttgtatattaggaacaaatcacagggttgtacgccccctgcgatattgagagtaatattgtcccattctcccctgtatattaagaaccatgtcacagagtgtgtgtacaccccctgccatattctgagtaatatcatcctctccccctcctgatattaggaacaatatcataggcatgggtacacaccctgcaatattaagagtaatatcatcctctccctccctgggtgttatatcatcctctcttccactggatattaggaacaatgtcacagagagtgtgtacacccgtgtgatattgaaagtaatatcatcgtctccctccctggatattaggaatccaaagtcttttccacagcattctaatccacatggatcattctcaaaaatagatcacatggacacagggaggggaacatcacacaccaggtcctgtcagagggtggaggttaggggagggatagcattatgagaagtacctaatgtagatgacaggttaatgggagcagcaaaccaccatggcacgtgtatacctatgtaacaaaactgcacggtctacacatgtaccccacaacttaaagtttaataaaaaaaaaaagtagaccatatgttaggtcacaaaacacatcttaaaatgtgaaaaaaaattgaaataatatcaagcatcttcttgaaccatagtggaataaaactagaaattgatcacaagaggtattttggaaactatgtaagtacatggaagtttaaaaatatgctcccaaatgatcagttgctcaatgaagaaattaagaaaaatattgaaaaatttctgacacaattgataatggaaacacaacataacaaagcctatgagatacagcaaaagcagaactaagaaggaagtttatagctgtaagtggttacatcttatgacataatgaggacatgcttacgtcttatggtgtagagaggaagaacttcaaataaacaatctaacaatgcacattaaagagctagagaggcaataagcataccaaagctaaaatgagaagaagatagaataaagcttagagtttaaataaataaaatggaaataaaaaatacagaaatcaatgaaagaagaagttgatttcttgaaaatttaaacaaaattaggctgggcgcagtggctcatgcctgtaatcccagcactttgggaggctgaggcaggtggattatgaagtcaagagatcgagaccatcctggccaacatggtgaaaacccgtgtctactaaaaatacaaaaattagctgggagtggtggcacttgcctgtagtcccagctatttgggagggtgaggcaggagaattgcttgaacctgggagacggaggttccagtgagccaagatcacaccactacactccagcctggtggcagagcgagacaaacaaaagaaaaagttcaacaaaattaagaaattattaggcagcctaagtaagaaaaaaaggggcaggatccaaataaatacaatcaaaaatgaagaaggagacattataattggtactgcaggaactcaaatgacgattagaggctacaatgggcaattatgtgccaataaatttgaaaatctaaaagaaatggacaaattcctagatacacacagcctaccaagattaaataaggaacaaattcaaaacatgaatagaccaataacaagtaacgagattgaagccataataaacagccttccactaaagaaaagcccggggcccaatgacttcacttcggaattctaccaaatatttaaagaaccaacaccagtcttattcaaattattctaaaaaataaaaggggatggaacactactacccagataccaaaaccagacatagacacatcaaaacaaacaaacaaacaaacaacaaaacaaagaaaaaagaaaaaaaaagaaactgcaggccaatatctctgatgaatattgatgcaaaaatcctcaacaaaataccagcaaacggaattcaagaatgcattaaaaattcatttgtcatgatcaagtggaattcatgcccaggatgcaaggacagtgcaccatatggaaatcatcaacatgatacatcatatcaagagaatgaaggacaaaaagcatatgatcgtttcaactgaaactgaaaaacgtttgataaagttcaacatcacttcataacaaaaaccctgaaaaaactacatacacagggaacataccccaacataataaaagccataaatgacagatgcacagctaatatcatactgaatgaggaaaaatgaaagcctttcctctaagatctggacgataacaagaaataatgcagcgcttgaggacattttttattcttctctgtttctctcgctaaagcatttcctacacaatatttggtctctgaaccatggggcagaatggttattttgctttgttaattttatagacacttaaacttaacagggttcaccactccataccaaaatttggtgaaccccaaggaccaaatcacattattggaagtaacagtgaaacccaagcacacttcccacacactgaaaatgctgagtttgacctgagtcctagtatcccagccaagagggttcccaaaagaaatgaatcctctagggcttgccactaggagccttctgttgtctttctgagtgagggatagggtgcacaagaaagttttcttccaccttcttctttttttgtgtatgagaaagtgttggaaataattgcttcttcttcagtgctgcaaggaagaatcagcatttagaccaaaagttttctcagcaagacaactttaatttctttagaaagggtgttgctcatcagctgagagcaccccaaacaaagggagacaggaatatttatctgttaagcatgaggtcgctactgctgtgtgctatctccattggctggggttggacctcacagtctatgctacatccaactggctaagaacctaaaactgtcctcaataggtaaagatagtggagacaaagaaaaagaggaagttgcttacaagaatgcttataggagtaacagcatttcccaataaggaaaggatataaggtatgggctggaacatgcctgggcacattcacgcatgcctgagcttgctagaacaagcactgaggttagagtataaatatatataatatgcttcttccattactcttgcctcataaagcttaacaaagatttactaccatcaaataaagaagcttgaagaaagtgagtttcaaagaggatatattaattccaacatttatgatttaaagaagaaaactttgaagaggaatgtttttattttccacagacagattatcactctaatgcctaggctagagtgcagtggcatgatcttcgctcattacaaactctggctcccagattcaagtgattcttgtgcctcagcctcccaaggagttgggattacaggcatgtgccacaataactggctatttttgtatttttagtagagttggggtttctgcacattgcccagggtggtctcaagctgctggcctcaagtgatccacccaactggggctctcaaagtgctgggattacaggctgagcaactgtgcctggctgaaagtgtccattctaaagatagcaaaggcaatgattttgtatcacttcagaatccttccttgaatgttaggcagacttcctcacccactatccctgatttgatttgtgtatccttgctaatgggggttacagctattaattttatttttgtaattgccattgtttggctatttggtgacacatagttcttgttaactggtggttgtcaatttgaagaatccaagagcaggtggagatgcctcaggatgaaaatagaaagcctccagacctgggagaaagaagggtgtatacacctcccgaaaggtagatggggggcagtgtacttgcacaactcactctccagaatgggcttggcagtgtcccagtggaagactatggtagatgatcaagaaaacaaaaagtctgcggaaggagttgagggtcgcagagggaggagaatctattgcagaatacacagtgcagacagaatactcaagggcatggatgaagtgtccttacaatgagggctgagggtctgagaattggatatgaggccattcaggagaggatgggagtctgaatctgttttctgcttagaagtccctccaggacaccagcttgagacaaaggttggaggtataggcattgcaggatgagggtcagccttttccagtggccaggtctggcaaaggtaagatgagagcagcttgctgtcaatgtggctctggcttgggtattgtgagcattgtcagggaaggctacagagagtcagatgagacctgcaggagcccatggcctcctagagacaaggcatcaatttagctaggtgttatagtgtcaccactatgacctgggagttacagtgtcaccactagagacccaacagcaggatgtggaactgagaagtggttgattggttgttcatgggcaggaatatgtgggtgttttggtttgagtaaagagtgggcacaccttagagaatgaagcccccaaaacaccagaaaattggacagggtagggagcctaggtcctggatggctgggggcaagctccaggtggagtgtaactctgagggcatcagatattttctgactcagttgtcatatgggccatatggcacatatatggcacatagggaacatattgcacacttctcttgcagtagcctgctagtgggtggacaatatcctgtgcactgaacagaggcagcaagtgagcagaacaactcatcatgacggctttttgtccttgtctccatgcaagccaggtgttatttctgtggtttcggacgttggtattgatgcacggttttttaaaaggggaggctaaagtcccagagtttggtagactgcacctctccagatgagattttaagagcccccgattttcacacatggggagagtgattgccctcacaaactcttcctcctcattgtggtttctaggttttcactttgtcagacattttgagtttcgatcacaaacactccacgttcacatcacccatgcatgctgcccacccgtatccacaaggctgctgtgtctactctgctcctgttttccaaagcaccccttccatcaggaaatgtgccttccattcctagggatgtcatgattcccagctttcatatctcctcacagaggaggttcccaaattactctgggttctcagtccagaagttgagcctttaaaacccttttctgtcatatggtcagtccgttgcagggtgcagcccctcagcagccaagattccctgtggatagctcttcaatctgattgcctgggctttctccatcatgaaacctttcatctccttggtccttgtcacacaccctgaaccccaaaatagaaaagccacaacagaatgaagtagatgagaaacaatctccttgtttataattccgtttatttcctcacataccagccaagcttctcagtcaggcagacacaatagatggaatggcaagggaagtgaagagtggaggctgcatcccttcagccgccagctgatgttctgcttatttcgcataccggaactcccaggcgtcctcaaaccacaatcacagttgttggttccagaaacatcttctttggaaaaacatgtgacatcagtttcctcagagtcttccggacaatccagtcacacagaactgacaaaaccttgtcaggtgagaagataaggatcttcttcaatacagaatatgtcaacatctccttctgaatagttccgtttatttgctcacataccagccaagcttctcagtcagcaggcacaatagactgaataggaagggaagtgaagagtgaagtctggatccgtttagcctccagctgatgttctgcttatttcctgtactggaactctcagaagtcctcaaaccacaatcacagttgttggttccagaaacatcttctttggaaaaacatgtgacatcagtttcctcagagtctcccggacaatccagtcacgcagaactgacaaaaccttgtccagtaagaaggtaagaatcttcttcaatagagaatacgtcaacgtctccgtgaacgaagagatctgctggttccaaggacttgtcgtggatttctgtcctagatactttcttccgtaattcaagataaagaaaattacaatctctgctgtccattccatcgcttttcccttcagaatcataatcagagaatccttgcagaacgtcgtgagtgtgctctcagctgcaatcaccagaaggactcttcacactcggtgagtcctcctcattttatagaagccaaagcagtgacgtatgctcacccctcccgcccccaggagagaggttgctggccaatgagcttgagcttcgtcatccttccaagccccacccagttcctttgcttccctttcaccaactttgactgaaatgaataggttacaacctttagctttctgccccttggaaaacggaagcatttagacatccgtattaatatttggatctagagtgttcgtgttttagcacttccttttttgaaaggagaagcagacgtgttgtgtttttaggaacacttccaagaagtttctcctcctctatgatgaaaccaacacaagaaagccaaaagggcgtttaaccccttgaagcactgagagtttccctgctgatattcttagactgttctttttctaaaacgagaaagaggtaagttctctttttttttttacactgcccaaaactctctctgctcagtgctgggcactggaaaacaatggccctctctctggaaaccactatctgccatctcaagggcccactacaggtctgcccagcattttcatcccttcctcaagtctggtgcccaggaccctcctctgctctgacagccaggcagcagcactcaaactcccctcccctcttagccttcataccttcagctgcacttctgcctctgcagtgtcaggatgacctccccttcctcctgtccttcctcattcttaagacttcctaccccttctggattaatttatggaaaacctaaataatctctttcaaattttagcccactttttacatgtagattgttttataagatgaattttaacaaaccttttctaagttgttcaaccattttcttttgtctttttgttattttatttcctgaatttaaaatatttgaaaacctctaaacttgacaaaactaattttttcataaaagctatgttctcatgtccttttataaactttgacttaaaatatattttacttgttcagtcagatttgtgtgtgaaaatttttaagtagctttagatacaaatattaattataatggtaactcttaagtatgcatttttagtaaaccacttaggagacaaccaattttaattatgtccttgatgtagagcttaaagaaaaagatggagctgtagaaaacatcttagtcttgaaatatcttactcttcccagtataagggggggcatggccctatttcacaggtgcccaggccttagctagaaatggatggttccaagacatgtcaaaaaactgtttgaaaggttttagaagttgttaatgacatgaaaatatttagtaaaggcagtatttgatctgtctaatttggatccaatatctaaactctgaagacatatttattttattttgctaattttaaaagtggctttattttttaaaataatgtttatgtttctttcaatagtgtgtggaatatatgtggtttttggttatgtggataaaagttccttagtggtaatttctgagattttgaggcatctgtctcctgagcagtgtataatatacccaatatgtcatcatttattcctcatccccctcccaacctttccccgagtccccaagtccattatatcattcttatgcctttgcattctcatagcttaactctcatttaaaagtgaaaacattcaatatttgatttgccattcctcagttacttcacttagaataatggcttccagttccatccaacttgttgcaaaggacattattttgttcctttttattatcaagtattattccatggtgtaccacatttgctttatccactcgttcgttgatgggcacttaagttggtcccatatcactgcaattgcgaatcggctgctataaacatccatattcttgtgtcttttttatggaataacttcttttcctttgggtagatagccagtaatgggattgctggaatgaatggtctacttttagttctttaaggaatccccatactgtttaccatagtggtcggactagtttaaattcccactagcagtgtcaaagtgctcccttttgaccacatctatgccaacatctattgttttctgacttttaaattatgggcttctagcaagattaagatagcatctcattgtggttttgttgtgggatttaggaggatgagagagaggctttgggttaaaacaggagaatcttttattgagtgctctcaggcccagcagactcacgtccaaagacagggcctggaacaaagacagcacttgacttttatacacacttcacaaaagggggtgggccagcttgaagcaagcttacagtggtgtgaaagcagggatacagaggcaggaaaaagacagttaatcaaattgtaacaggttcataactcaggattgcacataactgttgctatgcaacccagatgtctattatctaggttttgctctaaagaggcttgcattggtttatcttcactatggtgcctagagagctgtagttcaggcctgctcaggcttctcatgacctttgccatacttcttagataaaacagaatacttgaagttactagttaaagagaacaagaatctataaactcataccataaaacaaaggaaaatttgtttttcttctccctacattgaaggagtgctggaagagtctccagaatacaataaataatattatcaagacttttcctgggtctgggctgtgcctgttgctgcctctgggacaagttagcttaatacaagaaagcttatttccctttctttttaattttatttttctttaatttcccacctcagttttactttgcatttccctgagaatttttaataagtaaaatacttagaaatatacttaaccaagtaggttaatgtaagtttcctacaaggaaaactacaaaatagtgctgaaagaaatcacagttgacacaaacaaatgggaacacattataagcttatgaataggtagaatcaatattgtgaaagtgaccatactctccaaagccatctacagagcagtagaattctcatcaaaatatcatcattctccttcccagaactagaaaaaagaatcctaaaatttatacaaaaccaaaaacgtgaccgcatatccaaagcaatactttgcaaaaagaacaaatctgaaggcaggctttaaattatactacaaggctacaatcaccaaaatagcatgatactggtataaaatatgcacatagagcaatagaacagaatagagaacccagaaataaagccaaatgcttacagacaactaatcttcaacaaagtacacaaaaacattaattggggaaaggatactttattcaataaatggtgcaggaagtataaaaataggcacatagagcaatggaacagaatagagaacccagaaataaagccaaatgcttacagacaactaatcttcaacaaagtatgcaaaaacactaattggggaaaggacactttattcaataaatggtgcaggaagtataaaaataggcacatagagcaatggaacagaatagagaaccgagaaacaaagcccggtactttcagtcacctgatctttaacaaagcatataaaaacttccatctaagacctgaaagtctaaaaatgctacaagatagcatccaaaaagcttttctagacattggcttaggccaagtagtcatgactaatgccccaaaagcaaacgcaaaaatataaaaatagaataagatcaataggacctaatgaaaccgaaaatcttctgcaaggcagaagaaatatcagcagggtaaacacacaacccacagtataggaaacagtagtcacaaactaggcatctgacaaaggactaatgtccagactccaaaggaactgaaagaaatcagcaagaagaaaaggtgccatttaccaccttcctgactcattggccagaaccaatgttagtggaattaacatatgccccaccccaagtgacttctaaagggctaactcaccacaagggagtcagagcagatcttggactgagacctacaggacacaggtactgctttttctcttttatttgttttaaattttatttatgtttttagatcaaatagttcagattgcattggtttttaatctgctgttgttggattaacatatgctttaagcgactcttaaataggtggctcaccaggagaaaggcatagcagaacctggactgagacctacgggagacaggtattgctttttctcttctaatcattttaaatttaatttaccatctttcatcaaatagctccgatcatatcattattttttcttttctgttttgttggtggttttattggtggagttttattttactattttagaaaagcagtcttttaaaaaagacttttaaaaagttttattactcttttttttaaaaaaattatgttttcccttgatgtgcttatttcctttataaagatcatcaccattaaattactaggagatactgcggctgattttgtcatgcgtgagataagaaattttttgccaaagcaattagtgatgagtgcaatggaaaaatccgtgatgatcttttaagatgattaactttctaatccagaaaatgctgctgtttgtactgaacaaaatagctttatttttatatgaccaggggtacataaaatgcttcaaaacaacacataatttggcaaaaatactatgtcttgccagccagaagaataagtgtggttttatttctatgtatatgtctagtaccatgcctgcactagagttgggaaattttaaaaacatcacctattgatacagaagagaagtgctgggaagggaagggcatggtccctttgaatgatacagaaaaggtgaaggaaagtgatgggtagaggaggccggggtccctggctagggctccaaacctgggcttgtgcccctggacctagatgaggacaggcatttttgttttcctgaccaaatgttgcatttcccaagatcaccctggcccaccatgccctatcctgtgcctaaaaaaaccctgggaccctagcaggcagacacacaggaggttggacgtcgagaggagcacatcagtgcaagaacacatgggtggctgccacttctctccctttcctgagagggaaaaactctcgacgctgagaggaatccaccaacaggcaccagcactctggcaggccaccgaccaatggattgacatagagtttggctggggcagccagaggagagcctgggccgctgaataacccgacttcaggggaaaactattctcccttttggctcccccatctgctgagagctacttccactcaataaaaccttgcactcattctccaagaccacgtgtgatttgatttttctggtacacctaggtaacaaccgcgggatacagaaagccctctgtctttgggttaaggaatgggtctaattgagctggttaccacaaagccacctatagatggcaaaactaaaagagcacatggtaccacatgtccactggggcttcagcagctgtaaacatctacccctagatgctgccatggggttgtagccccacaacttgccagtctgtatgcttccctagaggtttgagcagcggagtactaaagaagcaagccacacccccactccacctcctgtgagggggacaaggaaacttttcccatttcaactggtggctcgtctgggatctcggaaggtgagtgtgagtgaatgggaaactgttgggcctgcctttcttccaaaactctgccacttctctccctttcctgcaggtaaaagactctgttttcctttcatctcttttctctctcacacattatttgaaatggatcttatctcttcctttataatgttaagagttttgctacaggctgaggcaatgttactaagtaaaatgagcatttggctcagccgccaaaggtgcaaatcagaccaatttttcctagaggtgccatgtatgcctccaccttgacagccccaggcatgagcggcttccagggcacctctccttacccttttccctcccagctccagcacctaggcatgcctgcagcaggcaaaggccacacccaatagccatgaaggggcagggggagcaatgtcgcagaagtgtctccctccactgcctgggatgaggggggtgtgagaaaaccgatggtagccaggaccctacagagtgcttctcacccactgcatcaatggaacctttccttccatggccaaggaattcaacctggtctgaactgggggaaggatgggaaagttataaggattagaggggcccacttgcactaagcaaggggttcttcccccagcattccccactttttgcctctttaactgtttttctctttttttcttttctaagtgagaatccccaccgctctgtttctaatagggaagttaacagaggagtgacccctgctggctgataattgcaaattcagcagggcttatttgaggcactaaatggatataaacagcctctgaaatgctttttcagtcccaaactcaattccaagcttcaggctgaggccctagaaagagaaagcaggtctgaggaattcaaagccaggcaacaggcacaatgtaaatggacaggaccaattcctgctgactgaaccccatcccacagaaggaggccatgcctcatgggataaaaaggcccagggaactcaaagtttttcaacagcagggagaaaaggaaacataggtgagggcagttaattcctaatctccaggttctccctgcttcatgggtacataccgcatttgtacctgtggccggcacctgccaaggttgccagggcgcaggggtaagaggtggaaagtgaagtgaagatgcttgctttccctccccatcacaccctgagctttttgccaaaagaaggaagggaaatgaggaacacctctattccctgtctttcagaatgggcagccagttctcctcaccacccccagcttgtactccccttgagtgtatcctgaaccattgggactgttttgaccctcagaatccagaggaaaagcatctcatagccctccgcacataggtttggccaaattatggtttacaggaaggactggcttggcttcaggaagggaccattcatttcaataccatcctgcaattagaacttttctctggatgtgaggacacatggtctgaggccccaaatgtgcaggctttctataccttgcaaagcaatccagacctttgctgacatgtaggattgttccagccctcctgtttgctgtctcggggaaggctgccagggtcaagcccagggaattaaagacacgagtcccagacgcacccccagctgacgtgccagctccctcaagccctgctcctctgggtccaccccaacctccgtatccagcttcagcctctcacctggcccctcctagaaatcttcatcccaaacaagcccagtctcactcttgcccctcctacagatgcccagtgaatttgggcccagtaaggtccaagtcctcttttccctacaagacttaaagcaaattaagggagatctgggcaagtgttcagatgaccctgatagatatatagaagctttccagaatttcaccctaacatttgaactctcctggagagacgttatgttacttttgagtcagaacctgatagacactgagaagcaggctgctctgccagcagcagagagatttggggatgagctttgcatcacctatagcatcagggaagggagcgaatattatccaactggaagagaagtagcaccagtgaaggaccctaaatgggatcccaataatgagatggaagactggaagaggagacactttcaggtgtgcataatagagggcttacgtaggtctaagaccaagcctctcaattatactaagttgtccataattaaccagggatttgatgaaaatcccactgccttcctggagaggctaagagaggccttggtaaatcacacctctctatctcctaattcaatcgagggacagataatcctaaaggataaaattattactcaggcagctcctgacatcaggaggaggttgcagaaatgggacttgggaccagatagtacattagaggacctcctgaaagtagccacctcgatcttttattatagagacccctgggaggaatctgactgccgttttcccccaaaacaatgccccctttcagcaggaagcagctaagactggtcatcatccatattctaatggcagttagatgtacctcttcagagggggcaaatgacatgaaagtgaagtgctgggatgggaagggcatgatccctttgaatgatatagaaaaggtgaagggaagtgttggatacaggaggctgtggtccctggctaaaagctccacacctgggcttgtccccacggacctagatgacaacaggcatttttgttttcctgaccgaatgttgtctttcccaagatcatcctggcctgctaagacccatcctgtgcttataaaaaccccaagaccctagcagtcagacacacaggaggcttgacgtcgagaggagcacatcagcggaggaacacacaggcggctggacatgaagaggaacatgacaacaggcaccagcacaccagcagggcaccgacttatagaacgatgtggattttgcctggggcagtcagaggagagccagggctgctgaacggccccaatccagggagaaaccaatctcctttctggctcccccatctgctgagagctacttccactcaataaaaccttgcactcattctccacgtccacgtgtgacctgattcttctggaatgccaaggcaagaaccctaggatacagaaagccctctgtccttgtgataaggaatgtgtctaattgagctagttaccacaagttgcctataaatggcaaaactaaaagaccacacgaccactggggcttcaggaactgtaaacatccacccctacacactgccagtatgagaaaaatttgctgatatgttttctgctgacctgatgacaatgttcctatggtcacactaaccactgctgggtaattttcatcatgactctcgttttcatctgctgaaaccagcctccccaagaaagacaactattttcaaactgaggaaataaagtgttactaaaccacagtgttctctcatggctgttcctggagttcttcaaaacacttgatattataaaatagaattattacagatcactgtatgttatggatttagtcaaaatgataatttaaaatatggtttaaaataaaaaactttattttccaaagaagatagttttttaaacaagaatatccaataaagacagtatgaggtcagctgactttagtgttggtgtatgtgtatgtgtgtgtgtgtttatagtttaaaaggtaaacaaaaatgctttattatttaatattacgcaaaacttttgtttaaaggagaaaatcaaattttatttttgttgaagttaatttttaataaaattttacgtaaaatctatggaattttaatcagtttgactctaaggtaagatttttataaagtttgcataacatttatagttcttttaaagaatagattaatattctaagaaaaccctgctattctgatacatgaacccaaattaaggccttgtatcagagtgtttttaatgaatgtttaatttctttaaaaacaaaataattccttaaattttaaccaatgcttttttttgtaaaatttttatagaactaatttttacaaatcttttacaacttatttaaaccttgagtcttgtcttgttattttttatttttgaatttaacataactttttagaactgcaaaactagacaaaattactgttttttataaaaactatatgttcatgtctttttataactttttattaaaaatacattctactttttcatatactttgtatgagaaatagttttagttacatatattcattataatgttaactccaagcaactccttttaataataaacttaggatgtatgcaattttgataggtagcagttgcaaagcctactgcaagggtcagagctgtagaaaatgtctctttccagcacagagagggggcatggtgcccttcatttgtccccaggctttagctagaacttaaagctctaaaacagacatgtaattcaattatttaaaagattacaggagttgtttatgacctgaaaatatttactaagggcagtatttgacctgtataatttaaaccaaatgtctaaattctgaagatgttctaattttactttactaataattttaaagcatgctttattttttaaagatttttaaagtcaggtgaattaaaagggatttgagttaaagtttttgtattttctgagaaaatatttaggtgtttagttttctaagccgattaatgagggtttcatcatatattttggtagtgaaacattatgtacacatgagacatctaaatatacagacacacagacagaagcagattttatagatttataactttttaattgttttttaaaatattttccatgatttaaaaaaaaattattattatttgttatttgcctagtcaggctatttgagggccgaaagtagtcaagatctatttgtccaatagagggcgcccctccacgccgctggctttttagggagtccgtcgatggaagacctgtaataaaaataaggttgatggttagggctgctgaggtgatgagccctagatttcttctagttcaggagtctaagtcactccgctcatgcagctaagtcattccccagcccagatccccacatagcatcattctccccctgtcccgcacccagactcacatcaccttcttcctcgtctggactcaaatctctctctctgctccccgctccataaggacacttgggattccattagggtctagccagataaaccagaagaacctcccaacattaagatatttaacttcctcaccttttcaaaaacgcttttgccatagaaagtcactttcaccggttacaggcggtagttcttggttacaggaacttgaaaatgttccctcttcatatttaccagcttttgtaaaaagcatgttttctgtcctgtgtacttgagcatgctaaagtcttgtccccttagtgattccaccttctgttgcccaagcactaggggagggtcctgctgcctcttttcacctctgacatttgcactcttacccaacatggctactgatccgttgaaaaggccgtgaatttaaatttaaaatggtgccatttaccacctccctagttcattggccaggacacttcctatcgggttaacttatgacccaagtgacttctaaaggggtggctcaccgtgagggaggcacagcagaacttggactgagtcctgcaggactcaagtattactttttccctttcatttgttttaaatttcattgacttctttggatcaaatagcttacattgtattgctgttttttttttctttaccattttgttggtgaggttttggtgttgttgctttttttctttctttctttcttttttttttttttttagaaaaagggttaacttctattgccctggctggaatgtagtggtgcaatcacagttcactgcagcccccaactcgtaggcttaagcaatcctcctgtctcagcctcctgagtagctgggactctagacgtttgctaccgtgcctaactttttagaaaattattttaaaaaaatattttaatcctttagaaaaaaatgtgttttccatagattccctgtttttaaatataaagtttattgccattgaaattttaagagatattgtggcacactgtcttatgtatgagataacaaaattcccaccagagcaattaataacaacggaaaaggcaatgacgatgtttaactcgacaattaaattccgaattaagcacatgctgatgtctatactaaaagaaaattcatttttatgcaattagttgtacgtgaaatgtgtcaaagaaatacataatctatgaaataaatgatgcattatcagccagaacaagtaaatttggtttgatatctatgtatacacccagtacaatttctgcactacagttagaaaaacttaaaatacaatataacctatttattgtaaaaggatgatgaaacatgaaatatgaacagcacaaatatgtacaagtatcacttctcaatggaaaaaattacgtataaaaaaaccagcagagtttgtggttgaaatatgaacagcatgaatatgtacaactatcacttctcgatggaaaaaattatgtataaaaaacaacagcagagtttgtggatgcattgataatggtaaatcctgtatgttatggtaaacatcttcatgaaaacacatttacaaacattttctctgctgaatggatgatcatgaaaaggaatttgttatcatcacatttgctggactgagcataatgaaaaggaatatactacgatctggattgttgaacttccatccagagaagaaatttactattgtgctacaagctgcagtaacaatctccttgtgatctcagcaaggcctgcagggcaatttacatcaggactcctcttttcctctccagaacttcacttacctgagaaagagtgtcttttgataaataaaatattattaaatgagtgtggtcttatgactgtttccagggtgatttgcaatgcatgttggggtgagtctctggggtgtgtgctgaggaggggtggcttttaatcttgagagaatgtatgaaagggaaagaaggtctccacagcatctgaggggctaaggaccatgaccctgcctggatttaagaaatgggaaggtttcagagggtgaaattaggtgttgagtcttggggggtgtttgagaagctcctgcctcaggagtggaagctctgggggaagtaaagacaatcctgggtgcctcaatggggcatttcctaatttcagagaaatcaaaccaaaaacagtgaggaaatggactccttgaagactgtggtccatgaatatatgtagggaaaggaaagagagatcagactgtcactgtgtccatgtagaaaggaaagacataagagactccattttgaaaaagacctgtactttgaacaatggctttgctgagatgttgttaatttgtagctttgccccagccactttgacccagccactttgacccaacttggagctcacaaaaacatgtgttgtatgaaatcaaggtttaagggacctagggctgtgcaggatgtgccttgttaacaaaatatttacaagcagtatacttggtaaaggtcattgccattctctagtctcaataaaccaggggcacaatacactgtggaaagccgcagggacctctgcccttgaaagcggggtattgtccaaggtttctccccatgtgatagtctgaaatatggcctcatgggatgagaaggacctgactgtcccccagcccaacacccataaagggtctgtgctgaggtggattagtaaaagaggaaagcctcttgcagtcgagatggaggaaggccactgtctcctgcttgcccctcagaactgaatgtctcggtgtaaaacccaattgtacatttgttcaactctgagataggagaaaagctgccctgtggcgggaggtgagacatgtttgcagtaatactgccttgttattctttactccactgagatgtttgggtggagagaaacataaatctggcctgagtgcacgtccaggcatagtactttcccttgaacttaattatgatatagattcttttgctcacatgtttttcattgaccttctccttattatcaccctgctctcctactacattcctttttgctgaaataatgaaaataataatcaataaaaactgaggaaactcagaggccggtgccggtgcaggcccttggtgtgctgagtgctggtcccctggacccactgttgtttctttatactttgtctctgtgtcttatttcttttctctgtctctcctcccacccaactagaaatacccacaggtgtggagaggcaggccaccccttcaaatatataggacccagaaccagtccattggggaggaagctttcaagggacacattttggctgggaaggaggacagtgaagctctccagccagggaggacgcctggcagtcacagtgatctcggaggggccctgcacacttccaccacttccggttcctcgattcctctccaccacacccattttctgagttctcctgggcaccaggcactggaagccgttcctgctctcattcctcaccccccttttcttcattcttcagggcacgacattctccaacatgttcacatccctcaattttccttccccacctgtctggagtctgaagctccaggcactgcaaggatgtgagttggggacctgtttgttctccccgttttactggatctttcagggtctccattgtccaacttactaggagccctgaatgcttgccgactctaccccatctgctccattctgtgggctgtgtcctctctcaaacctcccaggtctttcaggcccaggccccctcctccacttgcttgtgcccaggctcctacccagcctctgctaggatccagtattgtcaacaataaatagatctccttggaatcagggtaactggcaagctcggttgaaggacgtatgagaggatggaggtggagagttcactctcccaaagtgcccctcacacacacacgcaatggggacaatgccagagcctgaccttatttcacagcaagctgcccaaatctcaccttgctcagtgctggacactgaaaacactgaccctcccagtgaaagctgctctcctctgttcttagtccccacgccaggccactctgcattctgtacccttcccccaggctggtgtcccagaccgtactttacccagagagccctgccctcaaactcacttcctctccggacaggctttctgccttaagctgcgcttcttcctcggtggtagcaggaggccttcctctccctcctccctctatgatttcttgcacctaaatgaatctaaccttgctctcacctttgtcccttgtgccctaacttctgttgacaccttcatctggtgcccctgacataaccctggggctcctgagccctgggacatttgtatctagacaaccacgagcctaacaccctaaacagacacaggcatagacacacacacacacacacacacacacacacccagcaccaaagctgctcctaccccagtcacactggaattagatgaaaaccccaggctttggactccttggctgtgagggtcttcctggaaagagccaggtccagctgcattttctcataccctgaaatcgcaccactacaccccagcctgagcaacagagccagactccatcatttaaaaaaaaaaaaaaagtacccaaaagagttccagaataagataaaaatggtttacatacaatctcgctatctgggaatataaagtgcagttactaaaagcagggaatctctttcctgaaactatttctaactctgtgaggagctgctagattctacagtgcctgacagacagctctcaagggccgtttggcttgtgaatggcatttccaaggcaaacatcttgtttgaaagctgctgctctggttaaagaagggtcatgaaagtctttttttttttccagttatttgggtgaagtatgtttttgcgagcaaatttacctttccctctgcgttctccacattttgggttgtgattttatgacaatatagtttgtatattcaacttatacatatttatagtgttcagtaagagccttttaaaataaaacaattgaacacattggttattttcacaagactctaaccaaaatagtatatttttaggtaaaaacccaggaaaattaactcaaaagtagcctatatggccgatgaattcttgctgcattttatgcaaattatcaggccaagtgtaataagcctaaaattgattttgcacacaaattggtcttactgtaatttctctttaataggaaaaatagggggctacagaccaaccaggatcttcatgaggaccagtgagcacaggagtaggaaaggggtcactagcatcactgagatgcaggtggtggccattcctcatagaaaacgagatttttggggaacctcccatagtgctgagctccatagtgcccacggggatgacagaatctgagaatggctgggaccaggacttttgtcatcaaaagccagctggagggtataggcagtaaaattggaatgcagcaaagggaggctgacctgcaaagcactaggagggatctcataaaacctgttacccttagaggcaagacaggtggaaaaagagtaagtatgtcacttagtagacataatcaagaggagcagaaagccaaggtcagctgtccgccatagaatgtcatgatcccttgctcagtgaagacctgagacagtcctcacaccactatatgtttttctttttataacctttattaaaatacagtttattttttcatttacttggcacatttgtataattgtgaaattgttttcttagtagttttagttacatatactcagtataatgttagcttttaggaacccctctttagtaaaaataaaacaaaaacgtaagcaattttaattggtaggagttgcagagcccacagcaaaggacagagctgtggaaaatgtctgactcttcccagcacggagtcgggccgtggctcctttcacatgtccccagacctcagctagaattgaatgctctaaaacagacaggccagatgattatttaaaatgttttggaaacagtttttgacctgcaaatatttagtaatggcaatatttcacatgtctcatgtggacaaaatgtctacattgtgaagatatttttcttttactttactaataatttttaaaactgactttattgttttaagttttgtaaagtcacatgaactaaaaggcaattgagttaacgtttcaatttttctgataaagacttgattgaagtgtttatttttaagccaatgaatgagagatttatcatatattttgaagtgaaacgctatatacacatgactcatctaaatatacagactgaggtcaattttatagatttagaactttttttatttgttgggcttttaatattttttaaaagctttacatcctttatttttgataatttgtgatttccctggtgcaattatttggagcccacagcagttgggatctgtgtatgcagcagagggtgcccctccaagcctctggctctctaaggcctccttccatttcaagggtaattaaaataaggctgattgttagggattctggtgtgatgaaccccagccctctcccacttctgggggctaagtgtttacatgccatcgccctttgttcccctactgggcctcacatcaccttcttcctcttctggactcaaatctctctctgcttccccttcctaaggacacttgggatttcacgagggtctagctagataagccgggagaacctcccactgttaagataattaacttcctcacattcacaaaagctcctttgccacagaaagtcactctcacaggctacaggtcatagttcgcagttacaggaacttgaaaatattctgccttcaagtccaccagcttttgtaaaaagcatctgtttcctgtcctgtgtagttgagcacactaaagtcttgttcccttagtcattcctccttctgctgcccctgtggggagggtcttgctgcctgtacccacctctgacatttgcactcttagacaacatagccgctaatttgttggaaaggcgttaaattaaaaaaaaaaaagtgctatttaccgcctccctctttgacagaagactgtctgtcaaagtaaccccgccccaagtgactttttaaggggtggctcaccaggagggagtcagagcagaacttggactgagtcctgcaggacacaggtattagcttttctcttttatttgctttatgtttcatttacttctttggatcgaatagctccaattgtattgctgttatttggtttttcattttgttgttgggttttttgatgtggtgtttttttgttttgttttgtttctttttgtctttttagaaagagggtttccctctattgccctggctggagtacagtggtggaatcactgttcactacagcctccaacttattcctgggctcaagcaatccttctgtctccatctcctgagcagctgggactctaggcatttgccaccgtgcccaatttttttttaattcctttttaaaaatattttaatcctttccggaaaaaaatatgttttccatggacttgcttatttcctttatacagtccattgtcgttgaattcttatttgaatttgtgatacaccctctcatagggaacataacaaatttcctcccacagcaattaatgacgagtgcgatgagaagcataatgacaatgattaacttgataattaaaaatctaatcaaccaactgttgatgattgtactaaacaaaataatttcatttttacacaaccagttgtatgtgaactatgttgaaaacaggatgcatgactggcggccagaacaaagaagtttggtttaatttctatctatacacccagtaaaatatctgtaataccactggaaaaccttaaaatacattatctatttcttgtaaaagaatgatgaaatgtgaatttgaacagcataaatatgtacaagtatctcttctcaacggaaaaaattatgtttgtggatgaaatatgaaccgagtttgtggatgaaatatgagcagcatgaatatgcacagatatctctcctcaatggaaaaaatcacgtacaaaatataagaacccagtttgtggatgcgtgaataatgataaattgaggccgggcgcggtggctcacgcctgtaatcccagcactttgggaggctgagatgggcggatgacccgaggtccggagctcaaatccagctcgaccaatgcggtgaaaccccatctctagtaaaaatacgaaaattagccgggtgtggtggcgcatgcctgtaatcccagctactcgggaagctgaggcaggagaaatgcttgaaccctggaggtggaggttaatagtgtgcccagatcgcacgactgcactccagactgggtaacagagtgagactccgcttcaaaaaaacaaaaaacaaagaataataataataacgataaatcctatatgttacggtaaaaatcttcatgagaacaaatttactatcattttttctactgaatggatgatcatgaaaaggaatttatttttatttcgtatgatggactgagcatcatgaaaaaaaatactaccttttggattgttgaacttccatcctgagaaatttactattgtgctgcatgctgcagtgatgatcttgtgatctcagcaatgcccatggggcaatttacatcgggactcgtttcatctctagaccttcacttacctgagaaagacaagtgtcttttgataaataaaatattgttaaatgcaatgttgcctcatgattttttttttcttttccttttcctttttttttttttttttagatgtagtttcactcttcttgcccaggctggagtgtaatggtgcgatcttggctcgctgcaatctctgtctcccaggtttaagtgattctcctgcctcagcctcctgagtagttgagattacaggtacacaccacaatgcccagtgaactttgtatttttagtagagtcgaggtttcaccatgttggcctcgctggtctcgaactcccgacctcaggtgatccacctcctgggcctcccaaagtgctgggattacaggcatgggctaccacgttcagccatgattgtttccagggtgatttgctacacatgttggggtgagtctctgggttgtgtgccgagcaggggaggctctcaatatggagagaacccgtgaagtgggggaggaggtttccatggggtctgagaggctgagggccatgagcctgcctgggtttaggaaatgggaatgtttcacagggtgaacttggggtttgagtcctgagggtgtttgagaacttttttcttcaggaggggaagcttcaggggaaataaagacaatcctggatgcctcaaggggcatttcctaatttcagaaaaatcaaaccaggaacagtatgaaaatggcctccttgaagacggtgttccctgagtacctagaacccaaaaccggtcagttggggaggaagccttcaagggccacattttggctgggaaggaggacagtgaagctctaccgccaggcaggaagcccagccagtgtgttcccagaccaaactcagggtctggctgctatttctcacggcccaataacgagatgcagataaactggggaggaagagagttttttatttctggaaccggttacagagagaaggcccagaaaatatctccagaccaactgtaaattacaaggttttccagagcttatatattttctaagatgtatgtctacgtgtcagtgtgcatttatctaaagatataagtgattaacttcttttaatctgtaactctagtctaagtcttggagacctttctctggagcctcagtacatttacttaaatctaaatgagtccaggtgctggggctattaccctgaccttgtctcctgctcaatcacagaggtttggggggggttcctttagacccccaatgaacttgtttgtggaggcctggcgagtttcttcagacccccaattaaatttgtttaatcctaaacaggtctggttaagaattccttctttgttttgtcatgctgtaaggcccaggaaaggcctaggtaaaacccttggtgggcttttgttacattctagcctttgtagaaaggcgctggcactttcagcttttgatactgaacttaaccactcagtcagtactgaagtagttgtgatggggacctccattagtgaaatctggcctgccacaatccccactgtcaatttgcgcatgatttctatcatgcttgtatatttatttatcacaagaatcatagggagatggagcattgtaatctttctggctacttcctgctgagagggggtcatcgttatggggcaccgaatgcagcactggagtggaaaaagtcgatttgttcccagtagcactctctgtttcgggggtgtagaggcagcacctgctaaaacataatagtaggcaacagcaacacatataaataggttgctgctacttccttcagaagtttcggttgtctagtcttcagttcacagggctttaagaaagcacagcttaggtttcagtgatttccaattaagaaaaatggggaaaaagggaaagaaaaaggaaacaaatgaaaagattatttaggagacttgtagccagagaaatacgaatttaacccaaactgtagaaaataataaaaactgaatgccagactagaatttaaaaacaggtgtactatagtttccaaaagtttttgaaacataacttccctctctccagttacccttttttgttgttgttgttgagatggagtcttgctctgtcacccaggctgtcgtgaagtggcacgatcttgactcactgtaacctccgcttccctgcctcagccccttgagtagctgggattacaggcacccgccatcatgcccggctcatttttgtatttttgtagagatggggtttcaccgtgttggccaggctggtcttgaactcctgacctcagatgatctgcccacctcagcctcccaaagtgctgggattacaggagtgagccactgcacccgaccccagtttcccgtttttactaaagacaaattacgacaggaccaatttgctttattatgctttgccactttatttgtacgaggtgcagcaagaataattatttttcacataggcttttaaaattggttttaatgggactttgttttatagaaggaatctgagataagactttttaaagctgagcccctgccatggatttctaccatcaaatacatatggttgggtgaattcctgtcctcttgaagtttcaagataacttgggattcctgacctgtcagaatgtgacattcttttcttcccacagatcagtaaccctgtacagggactgtgttcacaggatataaggtcagttttccaaaggctttattagctccacaagtcaagtttgattccttaaaggaaagcacagcattctggtcaaaaccttggtaaaataaccagtttttcaaattgtgtcctgttaccaaagaaaacacattcttattgcacttatgcaaataactatattgccataaattaagaatacccacaaatagtttccaaattctggggaaatcgggtagagagaaacaaataatgctccaaatggtgttcataggagtatattttgattaatcgttaaaagctgtcaatagctcaaaagaaaatttgccttgactctgaaaagcaaaacaaaggatcagcaacgttttaagcaaaaagtcaaaaagatcacttcagcctcctattagttcacttcatgcagttaattcctgtcctgcttgatatcaatgaacattttagctctccaagtgtcccgaacatttttcctctcttctgatgtcacaatctccaaagttatcaaaatttgcatttaagagcacctgttagggctttatagctgattataaaattaccttctaaagagggccaaaacaaggtaacatgtgtatatgggtgactgaacgttttagggtagtcatagtcaaagacacaattgacaaggaaatctgttacctctgtggcccacaataatttaacatgacaattataattatgactgataatgtacactgagatatagcagaattataggagtctcccataactttggaaccctcatcaataacatatttatagaaatatagcccaaagaaagctaaaaatcattttatatttcacaatgcttcctgtatgatttttgtaccaaataagccaaatttcacctttacattagtgtactattaatgttaaacctaattcttaataaaacctgatagacatatttacccaattttaatgtttgaccataaggtaacatttttatagactttctataaccctttacaatttttgttaaagagcaggttagtgctctaagagaaacccattgtgtttttatttcaatgctcaatttacagaaatgctgaattataccccttcaactttagtcaatatgtttacacacaaaaatattttaattaattttttcataaacctttcacaacttgcttaaacatttagctttattttatccaacttaaagcaattctttaaccttttaatctaggcaaaaaaaatccatcttctcataagagctttagagactcttaggcttctttactaggacagctgagctctaaagcatgtgaacttcacccaccacaactgtttgctccatctcaagctcagaaccctgccctgtctgcctaaccacaagtgagtatttcctgccttgatttcctgacatttctatatttaattcagcttgttaagttccaagaaatcccctggcaatttttattattgacctcttcttctttgcacaggtatccaacccagtatctacaaataaatgcttcactcatctactcctttcatgaaacattgcaaatctttttcttactagtgcttgggcttgcttttttttttttttttttttctttgcaaggaaacatatagatgagcctcaagagatttagaaatcttttcagagtaaccagctgaatgtcagaaagtcatatttggaggccaatctagttagattagataaatagtttttaattttaacaaactgtcttccttttctaactggacctctgatctcacagaagccaacaaagtatttgcagtttataggatctaattttaaaatatgtgaagagtaggcacatctggaaggcagggcatctagatctttgaaaatcaaaaatcccgaatttcacattgaatctgaggtctctaaaagaagggacatgccacaagaccaagccacacaatttttccacactgcacaatgctgtagaaacatgtcttcaaggctagtagcacagcaacaatcagcccacttttaatcagaccatccccaaaggaaatcatattcattggtggtgttttcacagcctttaaactgtgtccaaactgcacctttctcatctaaacttgcaaagaaacaaggagccccctgcaatcacaaccatttattgcaacggctctcagccatctccaaactgcagccctcaccagtgacccagcagccgttgcactcacaaaggacgtgtctctcacagtacaaagtaatgcctggtactcacaaaaccaaagcaatcagccaagatgaaataaaagagagcagagctgcagacctggaggagcctgtccctgactctggactccacaaggagaacaggagacccccaaaaggggtgagtgggatctttttgtgtatttctcaaggaatttcagagtcacttaaaattccctctagatcccttcatgtgataccaaagatgccaaaaggaaggtaaagaagggaaaagaagaagtacatgggagaggaattccttttaaaaagaagtgagcagaggaaccaagcacctatttgttttaattcaaaatctaattttattttgtcaaaatttcaactcttattatagattcagggggtacatgtgcagggtagttacatgggtatattgtaccaagcaattaatttctaaaacggagtttcactcaaatccaaatatttttcaaaacaggaggcaaaagagaaaatccagaaagactgtatgtacatataattaaatattagcttttcatgaagccgacttctgaccatagagctctttgaaaaagaaaaataaaaccttccagatctcttataatcagattttagccaacacaaagaattgcgatttccactctttaaacttttttttaccaaaggtaatctcaccaatactaaataggtaaaaaagtcaaatgccacgcaaacattaaaccaaaggcgctggggccctgactgggaattgaacccaggccatggtggcgaaggcataaacttgaagctaggccacaatataaggcacctttcattgtgaatcccacagaatattgaaagcaggcagtatgaacttcaaaagatttttttggcagggggtcagattttttatctttaattttatcagaaggatttttaatgcaagccatgaaatcgttacatatctcctttgaaatttgattgtcccatgagtacaaataggtcaattgtttagaataaaggaatctaaaatctttttataaatttagagatttttctaatttaacagatccatcctttgaccactgcttagaatttgcgatgccatacttcttccagtagtgattcaatccaacacctacttcataaaaagccaaggatgtaattttttcagtttagtgtaagctttaccatttaagaagtaggtatttttgtaaagggcctgaaagaggcaatcccaaagatctcctcccctccaaaaattactcccagaattcggctaagatagcaaaagacccttgtttccacagctaaggatggagtttgtgtgcatgtggtgtctccagtaagacaaatctgtgggtcctccagtcacagacccgttactctgtggcgtgtcacttagaatccttgtgtgtctcaccctcagaaaattcagagcttatatctcctaatccagttttaccccaagcctttgttcctgggtgagccaatttggagattcaggaggtattatattgtagttggtaaatcaattgtgatgtggggtcctgtcgggttcgatatcacaagcagtatcagcatgtgaggaccagagctgtgaactcaacgctgtcaatcgacagcttttaggagtttctgtgaggactgggtggattcagggaccctgaaaaccatacttgtcacccttctagtcctgtgtgtctggaactagaaactctttggtaagcatgggttctctctcaggtccctggacatccctaaaaagagagagcatgtttacattgcaagtgaactggcatttcctttctctcctgcaaaatggtctcgtttgtcaacaggggatacatctctcttccttttgggaagtgggaggatgtaggttattcagtgctggtactttgatttagttcctacatttgatccctctacttggtgtgtaaggtagatgctattatcctcatgttagagatatggaaatgggctcagggtggatgagatattggttactttgggagaagtagcaaatgatagagccagtactgagccctggactatctccaaaaaccatgccaagagtttcgtctggggacctgagcctgatcatcttacttccatgaaatggggcctattttcaggcgataaacaactctacagaaaatgtgccattttaatgcaattccttttttcagtgttactctcctacctttacaactattatatgctcaaagttaagctaagtttcgtggaaaacagaaaacaaaatgcttcataattataagtcatgagatctacatagcatttaaaatttctctaaggcaaaacacatagatgaaattaaatggtgaaagtcaacctgtaaaaaagtgttttaaattttaaaaacatttgactatctttgaaacatctatctatctattacatctccttataatataaaaaacccagctgggcacggtggctcacacctgtaatcctagcactttgggaggccgaggcaggtagatcatgaggtcaggagatcgagaccaccctggctaacaggacgaaaccccatctctactaaaaatacaaaatattagccttgcttggtggcacatgcctgtagtcccagctactctggaggctgaggcaggagaatcactttaacccaggagatggaggctgcagtgagccgagatcatgccactgcactccagcctgggtgacagagcgaggctctgactcaaaaacaacaacaacaaaaaaaaaccttcaacatttatacaaacaaataaatgtctctagtataaaaattaacagaagctatgagaaggcagatcataaatgaagtgcaaatgctgaatgagcacaggcaaagattcttatcctcagtaatagataattaatcataaacttaaacgatgtattaaaatatatattctctgtttaaaaagtaaaagacaacatactgctttagtaagccttaattaaacaaactttcatggtaaaatttcattagagaatttgtgcaggctttggggaaaatcatgtattcattggtttggcatctctgtctttaaaaagccacttgagtgtcacactttaataggagatttgaatacattcctacctgtaattgataaatcaagcagtcaaatgaatcagtaaacatatagactatttgaacaatgtgagaagcttgatctaacagatttatgtattttactggaagttttttaaagcacacatggaaaacttaggaaattttgccatatattatgccaaatactacagctcagaaattactcatcgattgtatgcactgcacagaccatgttttgtggccactgtgctaaattagaagaataaaagtataaccagaaaatgtatctttagaaacaacatttcaaataaaacatcatggatttaaaaacaagtgataattaaaatttgagaatatgtcttaccaaaaatgaagactttatgtaaaagcacatagggtgtagctgaagtggtacttgtgggcaaatgtaaactgctaaaatgcttacagtagaaaagatttttaaaagaggtggtaattcatgagctacttacccatttttatagtaagaaaagagcaatgtttcaaacaggaaaagaaataaatataaaggcaaaaaataagaaaatagttaatatgtatgaaaaaagaatcaacaagtcaaaagatgttctttaaaaagcaaagttccagcaggattattaagaaaaagtgagagaagacgccagtactcataaataggaatgaaaatggcaacagttacagacaacagacaatgaaaggacactgagcacccttatgccaaatgcattaaacattagataaaatggatgaacacctagaaaactaaaggaaaccagaactgggtcaggcaggaaaagaggctggatgtgatgctgcatgcttgtagtcctagctactgggaaggctgaggcgggaggatctattgagatcggaagttagaggctgtagtgagccaggatcaggcctgtgaacaacgttgcatctcagcctggacaacagggcaatacagagagacttcctctcaaaaacaaaacaaaacaaaacaaaacaaaaagcatgagtagccctatcaaccaataatgaaactgaattggtatttttcatccttccaatacaggtaacaccaaagccagattattttacagagttctcccattattcaagaaacagttaattacagtcttacacatactctcccagaaaatggaaaaaaggaagcagatgcttagctcttttatcttttcctttttatttcttctttttttttcttttgagacagggtctcgctctgtcatccaggctggagtacagtggcacaatcatagttcgctgcagcctcaaattcctaggctcaagcaatcctcctgcctcaccctcccaagtacctaggactacaggtactcactgccatgcctggctaatttctatttttcatagagatgggggtctcactattttgcccagactggtcttgaactccaaacctcctgccccggcctccattagggctggtttcttagctcttattgtgaggctattataactttgacccccaaaccagaaaaaaatacagaaaggagaataacaggctaatctgagcatatacaaaaaatcctaaaagaaaatttagacacaagacagcagtaaataaaacagatattgttcagtgacaagtgggttttctcccaagaatacagttaaacagtagaaactcagttcaatgtaattcataactttggtgacttaaagaaagtaaatcatatgaatttttcaaatgatgtctccagaaaaagctttagctcaaattcagcctgaatttatgctaaaaactcagtaaaccagaaataaaagtgaattacctcaatctaaaaaagagcgtctacaaaatgctacagaaagcatgctttatacaatcagagagcaagacaagggtgttcaccatccccactttatgagaaaaaagaccccacaatatatagagggatattgccttgcagcaagacaaaaatataaaataaaaggtccaagaaataacaaagaagaaacaattataatttacagatgacattattgtctatatggaaaactcaaaagaatctgatatattgttagaatcaaaagattgttgaacaaggttatcagatataaaaatccatatatgagacacaatgacatttgttgaataacagcaaatgcaatttttaaaacaaactttttgagacagggacctcattatgttgcccaggctggtcttgaacttctggactcaagcaatccatctgcctcagcctcccaggtatcggggattacagtacaagccactgtacccaaaaagtgcaattaaaaaaaatttgtaatagcaagctaggaagaaagactttcacatgcaaggcctctatgtagaaaaacatgaaacctggttgaaagacaataaacaataactaacagaccataaagatataaataactaaacaggtgggggtgggggagagagagagagagtctgtgttcattaataggaagacttggtattatgaaaatactttccccaaattatgtatagaattatgaacttccaaataaaatccttgcagttgtcttttagctggacaagccaattctaaaattcatgtggtacaacaaagaaccctgaagaagagtaacaagggggcaattgcctactgcacatcaagttgtctcataaagctctgctatttaatatttaagacagcgtgctattggtatgctggtggcacagagtgaaaaatcaggaactatttctacacatgcatagaaactttataataaaggtagcattacagataaattggggaaagagaagcagtattcattcatgattcttgagaaattggtcagtctacacacaaagacccttggggatgtgtttgaattagatagaaaaagtactaatataaaagcaaaatatgatacattctattatattaaaagtaacatctacttaagaaagaacacaggccaggtgctgtggctcacgcctgtaatcccaacactttgggaggccaaagagggtggatcacctgaggtcaggagttcgagaccagcctgacaaacatggtgaaaccccatctgtactaaaaatacaaaaattagctgggtgtggtgacaggcacctgtaatcccagctacttgggaagctgaggcaggagaatcacttgaacccaggagacggaggttgcagtgagccgagatcggccagtgcacttcagcctaggtgacagagcaagactccatctcaaaaaaacaaaacaaaacaaagaaagaaagaaagaaaaaacactataaagaaagttttttttaagaaaaaaaaaagaagaagaagacacaaactgggaaagagatgtgcagcacatacagttgacaaagaatctgtgtccagaatatgtaaataacacaaagcacgaaggaaaagacacacgacacaatagaaaagctgaagatgtcacatcctaaaattgtgtctgcatacaacaggaaatatgtataaagaggtatgtccaccatggcagcatgtatacagcaaaaatacaaaaccaaaaaacaccccaagtggtcaccaaaaacatgagagaaataaaatgtggcatattaatgcaacaggagaatacctaataataaaaatgcaaaaactacagccagccacgcacatctacaggagtgaaatttgagaacataattttgaccgaaaaaaaaagcaagtatttgaaaattcagtatttcttttttctttttttttttggagacagagtctggcgctgtcgcccaggctggagtgcagtggcgcgatctcggcgcagtgcaagctccacctcccgggttcacgccgttctcctgcctcagcctcccaagtagctgggactacaggcgcccgccaccacgcccggctaattttttgtatttttagtagagatggggtttcactgtgttagccaggatggtctcgatctcctgacctcgtgatccgcctgcctccgcctcccgaagtgctgggattacaggtgtcagccactgcgcccagcctcagtatttcattttcaagaagtttaaaagcacataacgaaatatatggtttttcaggatgcagagtgtggttgaaaataataacagtaagagtattctaatattttgcatattggctactgagagtggggtggggaatggaattgggttgggatacacagcagagttggggatactggttctgttctttcttaaggtgggtgaagatagtcttgttgttttcactgttgctctccaaggggcaggacactgattgcagcagcccagccaggtcctatgcgaggccaccgctgtcctggccaccccgggacaggggccttggctactctcccacacctgtctgggctgttcctcggcgcttctgaaatcccatcccagccagggaaggaaccctggtggggtggagtggaggcgaggcactctgtaaccccatcggggtgtggagcagctctaggtcccaaaaggccactaggcatgcgcaaggtcgcacatgcagaagagagacccctgctcagaggccagagccggcatgaggcggtcagagaggatcccctagtggtggaggtggaaaattgcaaggacggaaaattccgcgtgaaaggcggactttgaacagatcccatccagggagctgctctgctgcagagaaaactcggacccagaagcagctcctctaggaacggattagcttcagggttgtcaccaacctgccttgagtgaagggcaagggggtggtcccttttccactggacgccatttccctggacaaggggctctcagcacaggacctaggcagtggctgggggctggcacagtggtggactctctatcccaggccagccgaggctccatggagctgccctaaggctcagcctgggcggattctgacttagaggcttcagtcatcatcccgcagatggcagcttcacccattggcccctcagccaagcacaggcaccaagtatctgaatctgcagggcctctggtactgggcaggatcgccatggcaacaacacatcatcaccagggtaaacctagcctgtctcacctggtctaaaccagctcaggttctctgagtgggtgagcaatcgtagaaattctgccttacaatgaaaaaaagaacccacagacagggatgaaaaatcgagggcattgtgaacgcttgctggccacaagccagctagccctgtggtaacatttctgacacctcctgcttaaaacccaaaaggtcagaaagatcctaaggccccgctttcaccttctgaattcctgccgcaaataaagaccaaggagtgagttatttattatttatttatttatttatttatttatttatttattattttgccctcctgctcctcgggaggcttctgtcctgagctcgccttagctaatcctgcgttaccgttcggcaggtgtgcgcctcaatctccccaccttaccgccagggaacttagcctgacgacactccgccccatcgggtcagggaaaaacggtaggagtagtggaatttcacatttcgccctctgcctgcatggccagtcaactccgcccctcgcggaaacagggggtgggcgcgggaccaactactgatcccctcccctgtctcttcacagcgctgcagtcaggctcagccgatgcttctttcctgcaggttccgccgagcccgtcccttggcggtggtgtcactggatgctgggaagagatggtgggaagagcctccatccattggcgcgtcactaattagacaaggaggccttgggctcccttgagagagtcacggtttctcctccgttgacccgcccttcattgaactcctttacttggatattcagagcgctggacagagatcacttggcgctaacaccctcggaggtcctcacggcgctccgtcggaatgacacagtcggattcccaagctgcgaagggtgagggagggactgcagcgcaggaactgaggaggagaggcccgcgcgcccactggagccgagcggtgaggaataaccggaccgacccccgacggtgcgtggtgagtctccccaacctgcaccattcgcgccccgaggcgccccaagcgcggctgggaggccagctgtggctgggacgattcactagaagggccggcctgcgtcgagtttccagggtggccgccagtgaccccggcggggcccatcccccttgccctcagagcccgccccgccccgctcccctgtggcaccgccaccgctactccaggaggcacagtggggaggagaagggggtggggagcctaaggagaggagtgaaggtgtcctggcctgccttggggaaggggcgggggcgggtgcctctgggacacccagcccgggggatcagccctgagagccagtccttaccctgaagttacagatctggcttccagatttctgtaacctaccttgttccaacacaggcctgaggctgttcctgttagagacctgttgcggatacgggtagggccctgcgggagatttacatctccagtcttcccccccgccccccgccccccttgtttttcacagacaggctagagcagcggcgctatcatagctcactgcagcctcgaactggtgaactggagggatcttcccaaccatcttttgtcttttttaagaagaaaaatacaaaagcttttatataggcttacacacagctacagagcaaatctttatcgtatatccaagattatcaaccacttgactgtacaaccaggaatcataacacatttgagaacaaccagtggcaaaataggaaaatgggccaatgaagaagataggtgactaataaataaaaatctgatatcaagtgtaggcaagttgtagggaaaatgggtgatgaacgaatagaacaaatgcctggggtaaacatcattcgaaagcccagaaagaagcttttagacatctttattgctttttgggggggcggggggggtggggttctggaggattgatggctgaactctcatgaaaagggtgcagtcagagaacaagaaagagttcccaggaattaaaattgtaaacagaaaagcaaattcagggtaattgctgaaagacccaccaaaggatctccaagatacaattgagaaaatcaaccctaacataaaggcaaaagacaaaggtgggttatttgagcgagaagtggtttgaggatttgcaaatatttgtttagtattgaatatgtgccaagcacacattacagaatacgttacttatgggaagtaacttagccttgaagtagctctgtgaggatgcatgtgtttcctttacctataattctataggaaaggcaatttttaaaaataaatcaaggttggatttcatcaattttacagaatacgcataactttataaaattttcaaaattctctaaaaacctattgagataattaaacaagcgtttttctcctttagtctgttaatgtggagaagtattttctgatgttgaaacatacttgcattcctgatataagccatacgtatgataacatattttgcttgtttgctattattaattctgaatttggttcactaagattttgtttgattttgcatgtatatttgtaagtgagattggtctataattttcttgtgtggttttggtatcatgctataacagcttctgaaaatgtgttagaaagtgttttcttgttaaagttttaaaccttctgagaattggttgaggaggagcttgaaaatttgttaaaattcaccataaaaatatcaggacctgaaattttgttattgttgtcagtaaataaaaattatcaactgtctttttaattgctttactgattattgctctattcataatatccattttttcatgagtcagttttggtaatttacatttatcgagatagttgtccgtttcatctaagttttaaaatatattggtacagctattgtggtattctctgaataattttaaaatctctcttgtgtcttcctgatttgtcctatttaaatttttttgattaatcaatttatattttcatattgttttctctctctctctctctcataatgttatggtttagataggaatggtccagggtggaatgacacaagtaaagaaacaataatgtggttttgtgtactataaggaaacatataaaagaaggcatgggaatacaaaggaatcaattaattgcacattaagtatttgttaaggtccaataatttgaaaaatattaagaaaagtgatactgtccttgctggacataggacattaaacagaccctgttaaacaatgttgagaacaaattaaggctatttaaggtagttcgatagcagtcaattataaaatgtgcatatcttgtgattgagcaaatgcacttctagatattactatatagaaatgtagaagtgtgccaagctaaacaaccatagatgttcattgcagccctgtttgaatggtcatagaaaatccgggatgagagtccaaagactcagcaaacaacaatttagcaattttgctactgcataaaagggtgcccccttttcaagcccacaacagagatgttgctactaatcctgaattcaacccagtttgttgcacattttaggatttcatcctgatgactaattttagggtcacctatatttggttaccacctctatttggttgcaaataaaaccgagcacaagttgactggcagaaaaagagactgtgctagctcatatcattgtaaagtcagccagaaatttggcttatggcaaagtttggtctaagactcaaacaatctcgctagatctcctgacagtagggaagatggtgggtcccagttttttttgttttgttaatcaatagtgaggattgggaatgtggagaagaaaggaggaagatgcagtaaaaaaaaaaaaaaaaatgctttggactttccagaccctgcatcattttgttttgggattggcttccttcttcctttttagtgcttcatgattcacccttcatcctacagacataggtgttgatgatggatcattgagggatgtgcttgacattttgggaacaagtggcctttgaggatgggactgtggatgtggcctctgtatcccagtcagataaaactatacagaaacataattttcttatatattttggatattatcttcttatcagatgtatatatttacaaatatatatgtatatatttacaaatatattctcctcccatttgtaggttgtctctttgctctgctggccttttttttctttgctgtataaaagctttttagtttgatgaaatcccgtttgtttatatttggttttgttgcttatgctgttgagattttatccaaaaactctttgcctagaccaatgtcatggattttccccctatattttcttctagtagtttcatagtttcagttcttacatttaagtctttatttaatacattttgagttaattttttgtgcatggtgagggatagggtctaggttcattcttctgcatatgaatatccaattccccagcaccacttattgaagaggctgtcctttccccattgtgtgcatgtggctccttggctgaaaatcagttagctagagatgcatgggtttatttctgggatttttattctgtttcattgatctatgtgcttgtttttatgccaggaccatgctgatttggttactatagctttgcagtatgctttgattgtcaggaagtgtaatgccactagctttgttctatttgtttaagattgctttggcaactcagggtgttttgtgcaggttttaggaatttttgtggtttctaattttaggatcttctacttcttcgaagaatatcattggtgttttgacagaaattgcattgaatctgtagaccactttgggtggtaaggacattttagcaatatcagttcttccaattcatgaacatggaatatcttctatttgtgcgtgtgtctttttcaatttatttcatcaatgttttacagttttcattataaaggtcttttacttccttggttaaatttacttcttttgtttcagctatcataaaagatagcttaaaaattttagcagtagatagctaagaataaattgtattctttttcagataattcattattggctattactggtattactggtggactattgcatagcatggttgattagagttaacaataatgtattccatatttctttttttttttttacttttattttttgagacagggtctcgctctgttacctacactgaagtatacagtggcacaatctcaactcactgccaactcagcctccccagctcaagcaatcctcccacctcagcctcctgagtgactgggactacaggtgtatgccaccatgcacagctaatttttgtctttttgtagagacaacaactcgctatattgtccagccagcatagtcttgaacccctgggctcaagcagtccacccataatggatgagaaagtgttgggattacagctgagatgggattgcggggggcgggttggggaaggtgaggttcagagagggcagggcctgcagggagaggggctgcagggagctagatactgccccccaaggaggagggagcactgttcccatcagagtgcacatctccttgcagcagctgcacaaatagagagccctggccaggctgatggagcctcccatgcctgctttgccccagggtgtggattctgaaatctgtgcccctaacgggtgggactgaggtccacagtgacatcccaggggaatctatgattccaaactccagccaccccgcctacaaaataggaaaacgctatgcttttcctattaaatcccaaattccatcagtgcaagctctcaccctctaaatcagaaagttcagtcattcctggcgtcctcccacacccccagcctgacttgcagacacacagggtggctgacacctgtccctgctcctccccctggcccagctgctgtgcatcctggaggtgatgaatgatcaggacaagggagcctagagcgggccccacagctgtcaggaagccaggactcagcctccaggcggcagtcaccctggtgccacagcgacagcgctgatggccattctgaagactgggggtgtcaggagagctgggcgtcccacagaactgcacagaataatggggaacgagggtgacacaggactcaggatttcagatgggtaggtaggctcagctgggagctcagggacagacctgaggagcctcagtgggaagtgctgaagtggaaagttctggaatgtttcaggaaaaaggctggaggcttagaggaaaggctgtcgctcctaatatggctggcaaccctggatgggctgtgttcctcccacctgcccatcctctcactgctgccacctctagggacacaacctctcttcatgtccaccttcccaaactcacctgcactcctccattatctgactttatgtgaaagcagtgctaagatccctctcctgcaatgcaagaaggagatgagaggcccgggtccccacagacaactcagcagtggggtcctgctgaagtgggaccgggcagaatcatgcactcccaacatcctggatcctgactgggggtaacagtgaagttcaaagaccatgccatcaaaatctccagagtgaggctcctccctggggtccctgaggtctgtccaggagctgctccctgagcaaatctagagcgtggagggctggggttgtggcagtaaaagcagccacatttgtctcagggtggaaagggagacggtgagctccagtaagggcaagggcgccatctagtgggcgcctcctgctaaggagcaaggagaccaggagagcggagatcagggctggccttggactaaggggtgagttcaggtggaggggactgaggtgtaaggaggcgggtgaagtggggaagtggtggggagacatgggaggagcaggtgaggggaagcttcagggaagctgcgggagggcacagcagggctctccactcctcagcattgacatttgggtggtcaaactggtggggctctgtgaactgcagggtgttcagcaccatccacccactcaatgccagcaggactccctcccccagctctgacaaccaacaatgtttccagactttgccaaatgtcccctagagggcaaaatttcccctggcagagtcactgatccacactaatctctaataacaattcaccagtaaaatccttcacttgggagaagaatcgcatgtgtgggaagagtagaaacttatatcttcaatatctgtcaaaatggctttcatttattccataatttgatgtaccaggagaaggcatgtttagagatgatgccatttggctgcctgtacctcacagcaggaatgacatgggctttccaaggatctatacaacaaaaaccagaatgacacacactgagttacactacaaagtgggacatgggggatcctgtagacattgaaagaagaaaatgcatgaccccaaggcaccagatagtccactctgatgctctcaccatcctagaaaacatctcagccatgaatgcagtcacatatgtcattaggaaggaatgtcttattaaggggaaaattgtagcaaaggaatttctgtttatgttcaaatttgtagacttttgtattattctttaaataagaatctactctcccccaaaatgaatgcaatcagtgtctggacagtgttggggtcttactcctggcccctgggagctgggagctgacagtgccctgctgccccagccctgggccttctctgaacctcaagaacactggatggcccccatttagggagtagagaggagaggtcttttaaacatcctcaccagtcacctctccacctttcagaccctgggcagaatctgttgcccactcttggatttgatctttaagttactgactttaaagcattttgacacttttttttttttttggtagtcagaagctttccacctccttgggaaaagtgattctctactctatgtacaggaataaccagtagaaatagagaaaaaatgcattaatattcagaaagaagatgatctctatgtgaacaaatgaaagcttaaaatcatcagagtcaacataaaatcaacattgccagtgctaaaactacaaaagtgacattaacggtgaactagaagaataaaacaagcattacagttgctggtaaacctaaatcacttatttttttaaaagaccattctggtatattgcaatgatgacaggagtgcccttcagtcaatatgatgcctgtaatttttgtgacctggcaagatatactgtcccttctccttttaaatctcaaatgcaaaatgagaggcaactcctgggtcaccccctcccagagcaaactgcctgcaagcagcccctggaagagcagaggccctagtttccctgatcctcaaggcaggagcgatgggaagctccctgtaagccgggggagagctttgttcccagaatgttcctcctcttcccagaggcaccaaccccgatgccctgacacttaccttctgctctctcgcccaatgttcactcaaatattgagtgcttggtgagtctgcagagctcaggaacttctgggagccaaatcaccaccagctcctccagaaaagatacctgtgcacacccaaaaccaccccactgagccctgcctggggtctgtaccacatccagcatgtgcactgtgagcatagaatccggccctgaattcatgaccacccaccaacatgcccccaactgaaaccagcaaattcccacacatggcaagcactgaggcttggaggtgctttctcacgaggtggttctgcttccaccatggggtggttgtcactgacactggaagttgctcagcacctgatagtggtgcaggactcagggaccctcaacatcaatctggtgaaggcagatggggcccctccagatcttctcccacctgcaggtgcccagctcagtaagaccccaaccctgggaggaggatccagacccctgtgccaggtagaccaagcttgaggcctcaggcaatgagagagaaggagatggaggtctgaccaggagctgctcttccttgagagcccgggtcccttccttgtgcaaaggcttggcttatgaacagaatcctcaatctgtagtgacagtgcctaagaggatgacatggactccggcctgatgtgcagccgtccctgtctaacccctccctgctgcaggacagcaccagcccaggagaggaatcctcagttggggagccagtaagaacatggaatactcggggcctcttaccttcctccagtccacagcagcagccaccgtttgtgcctaggacacccacctgctggcccttctgacccttacagtcaggccttccagatgccactcctgactcaaggcccagctactttcaccctgctgagccctgctcctcccaaccagggtcactgccttgctaagcacctcctccagctccagctgactggtcacccaacacccaaaccccagaggacaaacaagaaaataaacagatatgaagtctgaaggagatgcaggctatgaagacaaataaaagagtaagcatgaatataactccaccaacaaaattgtttcccaaaacaaaatcttctgtgcccatgatcatggaactaattgtccctcactatgtaggcaagcacttccagggtctctcaattatttcatgggtgtcaatatacactgtaacatagcaactcagaaaagaaagtgggaataatttatctacttagattaaggtcctaaaaaggtctccagactgccaaaaaaggagagctgaaccactcctgctttgagaaccattgaactacatcttttttaaaagtcaccccagaatggccaaaacaatctggaaaaaaaaattggaggactcacttcctaatttgaaaacttactaaaacactacaatcattaaaacagtgtgcttctggcacaagaatgcacatagagatcaatggaatagaatcaagagtccagaaataaaccctcaccattacagcccattggtttttgacatgggtgccaagattcctcaatggggaaagaatggtagcctcttcatattgtgctggaacaactggataaccacatgcgagatagtgtagttagacccctacctcacagcccatacaaaagttaactcaaaatgtttcaaaaacctaaatggaatagcaaaacttatcaaaccattagaagaacatataggagtaaaacttaatgatcttggattgggcaatggtttcttcaatatgacatcaagagcataagtaacaaaattaaaaatagataagtgaacttcatcaaagttaaaaatgtttgtgcttcaaagaacaccatgaagaaagtgagaagacacagaatatgagaaaaattttgcaaatcatgtaccccataagggacttgtatctaaaatatataaagaactattacaactgaataataaaaagataacccattttttttaaacagcaaatgatttgaataaatagttctctaaaaaatattaaaattgtcagcaaatacatgaaaaaatgctcaacttcatcagccaccagggaaatgaaaatcaaaactgcaatgagctatcacttcacacctactagaatggctataagttttaaaaaatattaaatagtaagtgtttacaagaatgtagagaaaatggaaccctcgtatattgctgatgggaatataaaatagcacagcaaactggaaaacagtttggctgtttctcaaaaacttaaacatagaactaccacatgaccccatatttatactcctatatgtacccccaaagaaatgaacacagaaacccaaacagatacttccaagtgtaagttcattgcagcggttttcacaatagcaaaaatgtggaaaccacccacatgtccattaagagatgaatgaattaaaattgaggtataaacatatattgggatattactcagccataaataggaaagaagctgtaatatatgctacgacgtggatgaatcttaaaagtgttaccctaagagaaataatccagaaaaaaataatacacgtatataattccttattatatgagacatgtaaactaggcaaattcacagagattgatagtatcagaggctaccagtgggtggggcagggggaagtggggagttattgattaaaagtatgaagtttccatttggtataatgaagattttctggtaaaaaattatggtgatggttgtacaacattgtgaatagaattagtatcatttaattctacacttaaaattgctaattcagtacatttatcttatgtattataccatatctaaagagatctttgggaaacaaacactcgccctgatcagatagtcctcatactcatgtacacacccttcctgaccttctgtaaaaagggatacaaagatttagggacatgagacagttcaggcaactgcagatccacaaaatatatgtatttgcaaagagaatgagagttaagctgggggcacagaccccagacacggagagggtccccctgaaaccttcaccaaggacagcagaacccagagcctcccacctccttccatcaaagtcctctcttcccaggacacacaggacacctccctccacacctaggagctggggatcctcccgagacctccaggcctgggtctctgtccctgggtcagaggccaggctggtgacactgaagatagcgggtgggtccttcccagccatcacccagtgagcccctttctagcccccagagccacctctgtcactttcctgctgggcatcattctgccttcctggagcactggagagcatgaggagacccagggcccagctggttttgtgtgtcacaaagggaaataatctaccggctgtgacagaaccaaggccagaacacagcagaggtcagtactggggagagtgggtcgtcctgttatgaggaccccatcagcgttgcttctcaaagttttgcctagggaaccaaatataggcaaaaaggaaggagaaaggagggacaagggaggcaggactgagaggggaggggacagagagacattgtaggcagagccccgcccttgcccataaacgggaagtgctcctgcctgagaggaagctcagcatagaggaaggaaggacagcagagacaacagtcacagtaaccctgtctagagcgttcctggagcccaagctcctctccacagaggaggacagagcaggcagcagagaccatggggcccccctcagcttgtccccacagagaatgcatcccctggcaggggctcttgctcacaggtgaggggaggactccctgggagtgggtgggaggagggagcacagagactggctggggtctcctggggaggatggggctctgagaggagacagagggcttttgttagagactcaggggagagagcgtctaaggagaaccaaaaaatctaagtgaactggaattgccaaggggcaaaacaatctcagttggtccatgttttcaagttcattgtcagtggccactacactttgaaaatgatagtaaaactatatcacagtgacaatttaaataaaaacaccaccagggcatgaaactctgtcttcatctgccaacctcagacattagcaaataaaccccaggatatggaaggccctgggaacgctcatgaactcatccacaggagtctgcagcctgtcccaggcactggggtgcaactaacatcactcaagtccatgccctcacagagctcacaatctcatgggggggaagacagacacccaaagagatctagaatgtgaggtcaggtgctgacaagagccctggagggaacagagctgggaaaggtcagaaagggaagacccagggtctctagaggaggcttcacgaaagaagtctcccagggattcccttgtgtgagtaggaactgaaggcagtggggagggaaccatgcagacccctgggaaagagggttcacacaaggaaatgccaaggtcagaggtactgaaggaatgagggtcatgctgctgactttgacccagtaggacacacacacacacacacaccctctaaggctgaggggtgaagagacctgcacccaggaccccgtctttccatgccaatgcataggtcaaatattgactgatattctctccctttcctagcctcacttttaactttctggaacgcacccaccactgcctggctctttattgcatcagcgccctttgaagttgctgaaggggagaatgttcatctctctgtggtttatctgcccgagaatctttacagctatggctggtacaaagggaaaacggtggagcccaaccagctaatcgcagcatatgtaatagacactcacgttaggactccagggcctgcatacagcggtcgagagacaatatcacccagtggagatctgcatttccagaacgtcaccctagaggacacgggatactacaacctacaagtcacatacagaaattctcagattgaacaggcatctcaccatctccgtgtatacggtgagtgattcctccgtgcctctgggtgttgggggtcagttctgcttcacatacgcaggattgtcaggcctgggctgtgcctgcatccccctctgcattacgtcccatgttggggtttgggcatttagtgcaggacacacccaggggagacaaactataacagatcagaattcctttcccttatccggactccgtggaaattccctacagcaagaaggatagtctgatgcgggagatgcagcgggggaaaatcagtctcagtccaaccccccttggcctcctcctcatagacatgacctgagaaagatcttataggactcagtcagggcctggcctgaggatcctctgagagaagctcagcccttgaagcccctgccccaggcccctgtcccaagatcctgactccagatgaccctggggagcctgtgccagggctgggttgtggcttcctgggcagggctgattgtgagcaaggatttaccagctgtcccagggccgtggttcctagagctggtcaccaggcagggctcagcccccagagccccatctgggcaagggcagagcctcatctttcacctgagagtcagagtggagaggacagacaaacaaacttcccaggccattaaactggatgggaaacttaaaagatgtcccgggaagtgcactgtcctcaggaggagggaaagcagagaaaagacactctggaccgctccttctccaccaggaatcaggcccagagaactctttttttttttttttggagtaaaataataatagatgatgtttatttggagctattctgtgccaagctttaggtcaggtaattgtaaatattttaatgttaatttacagagaggatggcaagccagggaccattgacatgtaccccattttattaaagagaaattgcatcagcatcacacaggctgtcagtgctcaacgtcacaccaccgtgtgtctgcagcccagaatctggtcgtggccaccaccgtggggcatctgtggaccccaggaccagatgttggttcagctcctttcttcttgggcatcctcagctcagagagggagattctggtctgaggaatgacgggcaaatggagaattagtcagtttttacttagaacgaaatcacctgtctcaactatcagactcaatgccaggattgtccaagcctctcccatcagatccacattccttccctcactggacgtgaaatcatgaatttcttgatttgttgatgtcactcccatgggaggatgaaggaaaggactcagctttctcttcccactacaccctgtacctgcacaaggcccaactgagacacacactcagtagttctctgatgaaggagggagggaattaatgaaaaaagaaaggaataatcataacctctttacagactgggtcctggatgtaggatcctaggaggagctggccacacctcttccttgtcccttaggggctgagacccatgttccatttctctgactgcctgctcctaaagccaccccaggtattgcatctcatgtgactctggggccgctcatctgtgggagggttttcagggctccctggtcctggtctgaggcagctgggtcctcctggtccctggggtctctgaggtcactgtagtccctactgctcgctgctatgggtgtctctggttctctctgctcctccctgtccttcatctttctcctttattcacaggagaatgttctaaatttgactctgagatctctgaggatgcagcatggccccaagacactttctgttggtcactctatccacagagtcagtggctcagccctccatccaagccagcagcaccacagtcacagagaagggctccgtggtcctgacctgccacacaaataacactggaacctctttccagtggattttcaacaaccagcgtctgcaggtcacgaagaggatgaagctgtcctggtttaaccatgtgctcaccatagaccccatcaggcaggaggacgctggggagtatcagtgtgaggtctccaacccagtcagctccaacaggagcgaccccctcaagctgactgtaaaatgtgagtgaccctcggcccctctcactcctttccttgtatattttcctaggagggagggggggtgtaaaatgatacacggaatgagaaggatgagattccttcagagcctggggagcaatgtgggtaagaactcagggattagactcatccagttatcatcctggttacaataggtaccaggtatttgaccttgggcaagacactcaacctcctgggcctcagtttcctcatctgtagaattgttacaaacacctggacctcagggtggttgtgaggatatttattcagagattaatgcgattaaagcccttaacaaggtcatgcacagagccagggctcaatcagtgctatcaatatcgactggtattatttttatgaactttgttgttattagctgttaagttgagcagactttggttacatttttgttgtatcactttcacttaccagttctgtaatcttaattgaagtactgaatcttaattgaagtactgaatcttaattgaagtactgaattgaagtacttcaatcttaattgaagtactgaaactataagtttcagattctaaattggcagatgggattccaccctgtttggaaaaactcaaactgtgtttttcctctgctctcactccacaataacaatcatcaacacagacacacttctgtgaccaaatgtgatgggggggggtttctcccacacacccagcagccaatcagttctgcaccgtacatcagctaggtgtcctccaattccatcctgacactatctacctggacatatcagcagagggctcagtcccacaaaattgccaccaccttcccaccagtcacaagtctgggcctccagagcttcttatgactggcttcacattgaggtttccatgactccctgtttgggttggattagtttgctcaaacagctctcaggactcagggaaacacatacttaggcttaccggtttgtaataaaggactttacaaaggatgcagatgaagagatgcacagagcatggcatgtgggaaggggtgtggagcttccatgccctccccagatgcaccacactccagaaacttccatgggttcagctcttcaaacccagtccttttggggttcatgacatagatatgattgatttaatcattggccattaattgattcaatcattggccattaattgattcattggtcattggtgattaattcaaactccaggtccctccccagggattaggggtgaggctgaaagtcccaaccctctaatcctacctgggtcagtgaccagcctcattctgaagttgcctaggggctgccagtcatcagtcaattattagcttgaaaaagacatcactttgaagattctaaggactttagagtcacataccagaaaatgggtgtattagtctgttgggagcaagccccccaaaatctggccataaactggccccaaaactggtcataaacaaaatctctgcagcactgtaacatgttcataatggccctaatgcccaagctggaaggttatgggtttacaggaatgagggcaaggaatacctgtcccacccagggtggaaaaccgcttaaaggcgttcttaagccacaaacaatagcatgagcaatctgcatcttaagggcgtgttcctgttgcagttaactagcccaacctattcctttaattcggcccatcccttggtttcccataagggatacttttagttaatttaatatctatagaaacaatgctaatgactggtttgctgttattaaatatgtgggtaaatctctgtttggggctctcagctctgaagcctgtgagaaccctgatttcccacttcacacctctatatttctatgtgtgtctttaattcctctagcactgctgggttaggatctccgcgaccgagctggtcttggctgctgataaagacatacctgagactgggtaatttttttaaaaatgaggtttaattgacttacagttccacatagctggggaggccttgaaatcatggcagaaggcaaaaggcatgtcttacatggcggcaggcaagagggcatgtgtagaggaactcccctttctaaaaccatcagatcttgtgagacttattcactatcatgagaacagcatgggaagaatccacccccatgattcaattacctcccactgggtccttcccccaacacgtggggattattaaaattcaaggtgatatttgggtgaagaagagccaaaccatgtcattccacccgacccctcccaaatctcatgtcctcacatttcaaaactaatcatgccttccaacagttccccaaagtcttaactcattccagcattaacccaaaagtccaagtccaaagtttcatctgagacaaggcaagtcccttccacctataagcctgtaaaatcaaaagcaagcttagttacttcctagatataatgggtgtacaggcactgggtaaatacaaccattccaaatgggagaaactggccaaaacaaaggggctacaggccccatgcaagcccaaaatccagcagggcagccaaatcttaatgctctgaaatgatctcctttgtatccatgtctcacatccaggtcacactgatgcaagagctgaactcccatagccttgggctccacccctgtggctttgcagggtacagccccactcctggctgctttcataggctggcgttgagtgtctgcagcttttctaggtgcatggtgcaagctgttagtggatctaccattctggggtctggaggattgtggtcttcttctcacagctccattaggcagtgccccagtagggactctgtgtcggggttccaaccccacatttcccttcaacacttccctagcagaggttctccatgagggctctgcttctgcagcaaacttccacctggacatccaagcattttcatacatcctctgaaatctaggcgaaggttcccaaacctcaatccttgacttctgtgcacctgcaggctcaacaccacatggaagctgccaaggtttggggcttgcaccctctgaagccatggccccagctgtaccttggccctctttagccatggctggagtggctgggatgcagggcaccaagtctctaggccgcacacagcaggggagccctgggcctggcccaggaaacattttttcctcctaggcctccagtcctgtgatggaaggggcttccaggaaggtctctgacatgccctggagacatttttgccattgtcttggggattaacattttgctcttcattgtttatgcacatttctgcagctggcttgaatttctcctcagaaaatggatttttcttttctattgcatcatcaggctgcaaattttccaaacttttatgctctgcttcccttttaaacataagttccaattccaaaccatacctttgtaaatacataaaactgagtgtttttaacagtacccaagtcacatcttgaacactttgctgcttagaattttttttccaccagttgccctaaatcatttccctcaagttcaaagttctgcagatctctagggcaggggcaaaataccaccaatctcttttctagagtataacaagagtcacctttgttccagttcccaagaagttcctcatctctgtctgagaccacctcagcttggactttattgtccatatcactatcagcgttttaatcaaaaccattcaacaagtctctaggaagtttcaaacttttttcctgtgtcttcttctgagccctccaaactgttccaacctctgcctgttacccagttccaaagtcacttccacattttcaggtatctttatagcagcactccactagctggtaccaatttactgtattagtccattctcacactgctaatgaagacatacctgagacttggtaatgtatgaagaaagaggtttaattgattcacaattccacatggctggagaggtctcacaatcatgatggaaggtgaaaggcatgtcttacatggcagcaggcaagaggacatgtgtagggaagcttccctttatgaaaccatctgatctcctgagacttattcactatcacaagaacaggatggaaaaaacccaccctcatgattcaattacctcccacaaggtccctcccataacacatggggattattacaattcaaggtgagatttgggtggggatacagagcctaaccatatcaatggtgatgaacaccaaatacgtatttcacaatatcacatacccttctccctcaaggcaatgggagggtgagaaaagctgcaggtagattgattcccactgtgccttccatgtggaaggcccctgaaaacagtcaatgaacatcatccctgctcatcagcattgagttggcagcaagggcctgccctttacgactgccatgggatggaaaaaaagaaacagggggaagaggagtgatgtgagaggaaggagggactaaaaaacacaggagcaggatgaggtgcaggcttcctgtgggagaatgtaggagttgatgcatcccagtaattcaagcctaagacacagaaaatggtgcaaccacggagagcaagggagccagctatgaggacagcacaacagaccacactcaggctccatggcatttccttcctccctgaccatgcccctgccctgcaaggcccctcatggttccccctggaacagatttggacctcatcccctttgccttcttctttcagcagatgacaacactctaggcatcctgatcggggtcctggttgggagtcttctggtggctgcacttgtgtgtttcctgctcctccgaaaaactggcaggtaccacagcttttccccattctgctcccatccttcacgctgaccccaggcgagaaggaaggagaccctgtcttgtattcagtgccaggctctccccagcctcccgactccccagggatccttccctctcattccatggcaccttcctcaccagctgctgaccctgggctgcttcctcaacagctttgtcctcagtgaattcagtccaattaaggccatgcccctgagcatggtcctagtttcctagcacagcaaagccacagctgcctggagcaggggggagcggtgctcaatacctggtacctccccctgttcactgaatccatccacccagtgagagggcatctgaggggggatcctgggcatcatcacatagtggagactggaacagcctggacgggctgggtggggtcagcacccctttgactgacatggtaactgcagacactgagctgtgagaagggagaaccggggccccaatatggcatatcctggaatgtcgtttatgtctcttgccaaagggcagagacagaagacaagatcattgtcccatttcagcatctccagccctgagtggagtgtctggtcacagcagggacactgagttccaggagaatccaagatgcatgcagtcccctcagtgtcctgcacatgtgcctggccctgctttccccctggtgccttgacccttcctctcaggcaacccctggtggtctgattccttccctgggtcctcagtccctttcctgtgtcactggatcaatgttctcctggcccagcatctgcctgagagtccttcccctctggccaggacagatgtggctttgtaaggcctttcctcaactcccctcacctgggcccctcctaccacagaactccataaagaaaggaggtctccatacccctcttggaaataggctcctttcctggtcccctattttaactccaatttgtgacttttaaccttgcaccttcacaaataaccctgacctttcctagggccagcgatcagagtgacttcagggagcagcagcccccagcctccacccccggtgagtgtcccttcagtctgggtgtggctgggaactactaagccagccccaagttgtccactcctgccagttacacccaggggcctctgaccctatccctggggctgcaaagaggatcccataaaacatcacacaggaaaccccaactggccgggtcagccctaacctccgggctctgggtcatgggtcacttcctcaacctcacttgcttacttgacccctaaaataacctgagaaaggctccctctccccaattctctaagaactgaggacccccacacactcttgcaggaggggcccagctatcctaacactctcgtgctcacttttgtctctgtccccaggccatggaccctctgacagctccatctcctaggtaagactgtccgttcccaatcccatttccactggggccccagctgtgcaggctcagggcagggggactgtcaatccccagcacaaacccaccctacccagaatgacttggataaggttagacctgccctggccatgagctgggcctctgttcagggccaggatcatccactccctgtgctaaccccaccctgggaccctccatcacctgaggagagccctggaattcctacacagcaggaatccttccctgtcccctgacacccctctctcccctgcccagattcccctacccagcaccagggcagctgctctcatctatgaggtgagtgggggccacagatattctggtcccttgggccccagggagacccaggatctgtccccactggcatctggctgagctgaagttcaggaaactgcagtgaaaataacaggaggtggtgagcagaggagggaggggcctgggagcaggaaccccctgagcacagccaggttcagtcccagagtagccctgggtgggcccagagagagatgccagaccctgttctgagaaggcctcaggggtcaagacctcttctctgtttttacaggaattgctacactctgacacaaacatttactgctggatcgaccacaaagcagatgtggcttcttaggttcctctgggagctgctcctgtgggttgatggagcgtccctgaagcccccagccctggggatggggaaggacatggagcctgagccagagaaccagctctgagtcctgaggagacacaggcctggggacaggaagggatgggggtccctgctgaatatatagagacctcaacagactgccccgggctctgggtgggccaaggcgaaggcttcccatcaccacaggaagtgggggcttgcagggaaagtgaatgggcctatggcccacccggggtcacctggaaaggatctgaataaaggggaaacttcctctcattggctctttttctgctcatgggaacttagcagaaactcacctgaaactccatgtccattctctcctgggtcacacaggaaaaatatctccaccttatctcaaccccagtctctcttccctggaaagacaggagtagggggttaggagtcaggctggggtggaccctacacaggaaagggcaggattcgcaggagtcctgcccagccagctgagtgctcagctgtcctcacactaccctagagaccaaggccatgcacagccccagcctgggtccctctgtgaatgcatgagatgtctcaggagtgcaaaagttggggccatctgatgtccacacaaaggtgagcaatgcaggagcatccatgggtggtacagatcgtgggtgtgacctccacacagcctccagtgtcctgagccctcctgctctcttcacccaggccctggaggccgtatctatcactgtcccccagcaatgagcttgcctgtccccaaatccaggatcctggatgcttagctctggccaccaggttctcctctgtcccaatggccactgctcaggagatctttatccccgtgggacacagagaggggttgtcagagtaaccaaggtgggaacagaccaagaattcagtccttgagcaaggtcctcccaggcactacccaggactctagcccctcatttcccatcagttcccaatttaccccctggcgtggatctcactgagcaagcctcctctccacacaggagcgtccaggtcagaggagcagggttccccaacctaaagctcgtgcaggctcccatggcgatgggacaacctgtctgcccctctacctggacccacaggcccctccagccctgcctcacctgcagctcctccacacacctgggccagctgttctcagcccttccctgagggccctggggagagtaacgatctcatgtaggttcacttggaccaggtgctaccttcccacaaacaagccggtccctccactaaagcacagagccgtggtttccaagggtgttctgccattgtccagggttgttggccatgagataggaagtaggaaaagcaacctgcaatatttacatcaggatttagctgtaaatgaccctggatcccacctgcacacaaggtgactcctctgtaggttcctgttgaggctgtgacaaattcccacaagctaagtgacacagaaacttgaaccaaggtgcccacatggctgcgttctttctggaggctccagggcagagtgcgtttcctctccttttccacctcctagaggcctcctgcatccttggctgtgtcctctttctccatcttcaaagccagcagtgcagcatcttgacaccgctctgtcttctgcatctatccccacatctcctcctccttctctgactctcccacctccctctctcatttgtaaggaagggattctgtgattatgttggacccatctggataaactacaataatcttccaaactcataatccttcatttaatctgtaaggtctcttaccatgtgacagattcacagatgctgggggtgatgatgtgacatttttgaaaagcccctgttctgtccatcacccctttcaagaccattttctcatccttgctcactacaaactgcacatgggctcctggacaaggccatcctgactgtggtgtcagtttctgcaataatgtctacagcagcttcagggttatgggagagcaagacagaagtcacttcaagatcctgaacacctctccaccttctcattgttaatgatgctctgttgttaaaagtgaaaggagagcagaggtaactagaagattctacatcacactctgttccatagctcttggtcgtcagcaccacggacagtgtctcaggaatgttcattctgaggtgctgcagcaggaaggtggcagatgagaacagactgctggaaagatgtccatgtctagtttacaagaaaaagacacaaccaggaacaacgttattgcagggaaacttgatctgctctattttatatatcgcaaaatttttgcatgcatctggatgttggggttcttggcacatctattgccataccctgcagagctgagtgctgcacccagggtgtggtctctgggaggctgagagcctgctttggccacatggtaagtctccctgaccctgacaatcaggccattttctctgcctacagaaggtgggaacttttcatggttaatttttgacccccgtgcctgaccctggaaccacacacatcacgctgcctggagcatgccctgagcacagcatcctgctcctccagccccagctgagcccctgagaagctgagctgaccaagcccatgggcttctgtaccagatcctccaagccaagccttgtcacccccatcttgctaattcctgcccacgtcacacccacagagaagactctggtcctacagaccagcgctgcccttacagagactcaggtccagcctatccagtgtccctgctgggcacacacagcactcaggatgcccaatttaagggtcatctgtgggctcgggggtggggaggtcctgtaacttgcatgggtcagagccctcctcacatcctacatttcagcagtcaccagggtcctctctgccctgtcctcaccttcaatgtctcaatgactcactcaatgtcctgggtcatccttgtcatctctcctggacatagccacagctcctgacaggaggggttgaggctctgtctctccatcagtccctcccactctgaccacatgaacctggtcagccccatctgagcctcatcccctcaccaggggccctgtgctctggatccctggatacctgggtccttgtcatgcaaacttgacaacagtaataaccaccaggccctggcatcctcacgcaaagcacatgtctaatgagagacaactggctccacacaccttgaggcttcactgctcaggggcatcctcatccctctcctcccacccctagagatggtaagcaccaccagccccttcccccagaccacagcctcagatctattctgaccctctatacagagaggctctagggaacagcaggcactatgaaatcccaccgacccaggtgccacccgcggcctcacccctcctcatatctatgatggggacagacacacataacacacctctgctcactgcccagtccccaaggtcaatcgcagtctgcttctcccctagatccactgctccccatgtcttccctccccagctgcagcctgggtggactccctgcttttctcagtccatgaaggcaggttccaacctttgtgttgttgcctgcaatgccctcccttctcttcccttccctatgagcgcacacctgcccatccccctaccttctggccaaagtcatcagccacctgctcccctcagtcttccccaaccctgcccatggaggtgacggttcctcctagaacacccaccactcactcttggctttgggtggtaatcacaggttctgcaggggtcacctgtgctcaggtgtgtcacctgtggaaccaaaacttctgagcagagggagctgctcaggacatcttaggggccctgacctctggtctaccacaggaactcaatgcgatcttggtgggactgtggtttagtccctatagcaaccttgacctcatcatgtttaatgtgcacatgctccgaccagtatcccacttctaagagcctccctgagctgtgagctctgtgaaggcaagactgtgcctgtcctctctctgctgaagacagtgaccagcccacagcctggcacaggatgcttcataaacatgcgttgactgaatgagctcctggatcaatactccacatggggaaaagacatgtgtatgaaacactgcagaatgtctcgtcattatgaaaactgggaaacagcccagtaacttaaaaaaaagattgagatgaaggtcacagaaaataccatatgtttaggaaacaaataatagcaattcgggtccactgaatcagggcagccctgactagtgttctgtaagacaagcacaggagagggttttctttacaggtaatttccacaaaaagttgttttcagaagcagctcattggctgagaaggaatcctaaatcacaagtccattccattctatgtgcttagttaattttagggttctcctagttgagatgttgaaggctggtgaatactgacttcagctgtttatccaaatctattggaacattctgtggtttgagctcttgctggtgaaagtgcaattgtcttgcaatctcctgactccactttagaaagctttagcctttgttacttcattttctgtcacaagattccaacccaggaacaggggtgtggacaaagcattgagtgtagccatgcaatgagaaaaaggggagccaataacaaacacaagataaaatccatatgtattgatataagaggtgcccaccacacatgattcagtagaacagaatggtctgggcaggtgtggtggctcatgcctgtaatcccagcattttgggaggccaaggagggtggatcatgaggtcaggagttcgagaccagcctgaccaacatggtgaaaccctgtctttactaaaaatacaaaaattagccaggtgtggtggtgtgcacctgtaatcccagaaactcaggaggctgaggcaggagaatcacttgaacccaggaggcagaggttgcagtgagccgagatcacaccattgcactccagcctgggcaacagagcaagaatccatctcaaaaaaaaaaaaaaaaaaaagaatggtcttcagcaataatataattcaatgggtattttggcgtaaaacgacaagtgagataaacagagtattattaaagagagattcacaccaactgcaaacagtggtaacatcctggaaatttaattggggaaggggtggggtcaaggataagacaccttattttacgcatgattagattcctgggatttacaataaatatgatgacttacatcatttttaaagtaacagaagaaaccatttgaaaagactcaggaggtgtgtaaggtcctttgggtctagagcccaggcctccctctatcccccacacttctgcgtctctatcccccacactctgagatggccctttgaagtctccccatctcacccctcagagacagaggcatggagatccctagggggagggaccttgctgcagctcccaaagctgggggcagggggcagagtgaggttctgtccagcccaacatgcactgagtgggcacctactgtgcgctccttctggccagtgggatggtccctggcctgcagagtttcaccactcagtggatgctgggaatgggacaaaaaagaccaaaccaccctgtaggtccagggatggctggcctccctcagcagggcccacagccccccatggttcaccctcaccaaggtcacctcaacccacctcctcctcaccctccaagctctgcacacgaactctgtcacctcttccctgcagccaggtggccgcccacctgaggccactccctctgcaggcagctcctgcccccacaccccctccttcccagggctcagtcaaaagggcatctcccaaggcacagcaactcagcccgtcacaggctctggtgtccccagtgctgtcccctcacagcccttctctcattatcattaactcctcaatcgcatgaagttcactgagtgcctgtttccctgtcacatgaggtcaggagttctatacaagcctggacaatatggtgaaatcccgtttctactaaaaatacaaaaattagctgggtgtggtggcatgcacctgtagtcccaggtactcaggaggctgaggcagaagaattgcttgaacccaggaggcagaggttagtgagccgagatcgtgccactacactccagcctgggcaacagagcgagactccacctcaaaaaaaaaaaatccaattccaaacactaataaaaaatatggactttggcatgaacccatggtaggggaatggggagaccaaaaatcccctgactgggaaagtgataggctagtacactgctgtccaataaaaagaaaacccaggacaccctcactgttttgtgttgatcttttttcttaggtctcatcataaccgttttatgaatgtgggagctccaaagttaggtgcatatatatttaggattgtaatatcttcttgtttgattgatccttttatcattatatagttgccttatttgtctttttcttactgttgttgcttaaagtctgttttatatgatataaggatagctattccttctcacttatggtttccatttgcatggaatatcttttatcatctctttaccttgagtctataagaatccttacatgttaagtgagtctcttgaagacagctgatatttggtttgtgattttttatttatcttgccaatctgtgtcttttaagtggagtgttaggtcatttacattcaatgttaatatttgttccagtcatcatgttgatcgttatctactttgttttcttattgtgttattgttttataggccatttgaattttttggtttcaagaggttctattctgttctatttaaatcttttgttttgtgatttagaagtccctttaacattccatgtaggatggtctagccgtgacaaatcctgaagcatttgcttgcctgaaaaagactgtatttctctctttcattttgaaatataatttcactctacacaagattcttggctgagagctattctgtttaagaagccaaaagattaggaccccaataccttctggtttgtaaggtttctgatgagaaatctggtgttagactgataggttttcctttataagttaattgatgcttttgtctcactgctcttagaattcttgccttcacattgactttagataacctatgactatatgacttggttatatcctttttggcagtgaatctcctggatcacttgagcccaggagttcaagaccagccctgggtaagatggcaaaaccccatctctactaaaaatacaaaaaattagcctggcctggtggcacacgcctttagtcctagctacttggaaggctaatgtgggagaatcatctgagcccaggaagttgaggctgcagtgagccatgactgtgccacttcactccagcatgggtgatgagagtaagagcctgtctcaaaaaaaaactagctagcattttagaaaatttttcatttatattctgattgttttttacatttctttatgttggttttcacccttctcttgtatctctttgagtagcttaataatcaaaccttgtaggcatgcattattcttttaattcttttttcttttgtctctctgactctgagttttcatatattatctcttcaagctcacaaattctttcttctgcttgatcaattctgctgttgaaagatttagtgcattcttcggtttgtcaattgaatttttcagctacagaatttctgcctgatttttaaaaattatttcagtctattaaatttatctgataggattctgaattccttctctgtgttaccttgaatttcactgaacctcttcaaatagctatttttatatgctagttttgaagagggtctcagggatgagagtgggtttgtgtgttattttatttacccctctcaaccgccatctaagtttatttcagaggaggatgcttatcctcagaaagatgaatcaacttgccaatgttggtggtggatctgggattagaagttacatgagtctaacatcagaggccatgccatcatcactaccactgagagagaagtgaacacagtttgttagggagcaggaaggagcaaggagggctatggcagcaagagacaattttaaaacagggaagttaggtaaggttactaaagagataccatatgttataaagccatgaacactagacagagatattcgaacttgatcttgtgattacaaaagagccactgaagattttaagtaagggcaaaactattcgaagtcacagcatgagccaagaccaaagagggtagtgaaattggggctctggattcctaaactaaagagatgctgccacaactgtcgttcacaacagtgaacaaaccgtgtgatgtgtggagtgagaactggacaaaggctgaagccctgggtttaaatgcaagaagtcaggcacttagggaatggctttgttaggcaagctgtatatgctctctctggaccttggtttgttttcatccataaattagatgcagtgagaattaacctctaaatgatcttcgagccttgctactcaaagtgtggtccgccaaccagcagcaatggcatcatccaaaagctccttagacatgcacaatctcaggcctcaccagaaaaatcagaatctgtattgaataaaaagatctgtgtgggatctgtgaacacattaaggtttgcgaaacacttctctccattgtcttccatttctaaaaggcaattattccatgctcacctccactctgttacttcacaggagaaacaagaaaaaaaaaattatctgttcacctcattagtgcccttttcttagtcatgacatcctcttagactggctcagttccaggaagaggttttagaaaataccagagaggcagtgctgccaccctgtgaccatcgtcagtaaatgcgcttaactctgaccagtgtcaacagcaaaggagagggactgcagatggaggtgaagtccaagtcgcagactagatgagagaatcacagccacccacaattacttaaacagagggacctcaacctgcatcatagagcaatgtcctattgcaaaggacagtttttataatacttaatatgtggtattagtaagaaacctggttccaagccaagctctgcccttgtaaccataaaagtgaccctgacaggtattttcagacacccagccctggcctgaactctgccagtaaacatgtaatttcccaaaagaccttatgttactgtgacagttcttttccatcctgagccaaaatatacctgatacacactcaccaatccctgtcctactccccataagctgaaataagcctaacaccttttcatacaacctaccttcaaatattggttaaaaaaaaccatgtgccgcccaccccaccttcccttggccatttcccacatggggtcacctgaagccccacaccctctgatcactttcccatggggaagcaaagtgcagcaaccacagcaggcactgtgaaacctaggggtgtcccccagggcagcagagccacaggacccccatccccatcctggcacctcacccctatctagaatccgaacaccacatcagctgatctggggacgctgacttttcctgcttctgctgctgctcagtcatcccacacctgtgcagatgtctactttttattccattttattttgtaagaaatatttatcagagcctgctgtgtactgtcactggagagacaaagatgaatcacacctggtccctgcctcgcagaactccaggctgtagagggaacacactcaaagccagactattaccgttcagtgagaaacaccgtgacagacatcagcacagggttttctgatgcatgttaccagtgctttgtgaaaaatcttccactcttggttttctgcacttagttttcctcatttcaagctctaagtgaaaaagagaatacaaatatccccaatggtcctttgtgcggtcacagctggacccggcatgtcctcttggctaatccagggtgttcagggctcccacttcactctgagtgtcctctctcctattggagctcaccattgtcagcacctgcagcagaaaatctagcaagtcaggaaacttgctttactcctgtaactttaaggctagtgaccttgtgacagtgaactaatcctataaatccttttcactttaatttccacatctgtaaagtggggcaggtggattcagtcaccctagagacagcagcacacctgatcttctcagcatccaccatctagcaaatatcaggcacacattaggcactcaaagcctcactgaatgtatgtgtgaataaatgactataatagagccatgtggatcgtggacactatcaacacatatctttgaatgtctatgaagtacacttgagaatggggaaagcaaataattgaggcaggacagtgttttcttcttccttccccttacctccttcctgaagagagcctttgtacctcggagagactctgttgccaggtttctctactgtaagttactatttgtcccattataatcaataagtatctcctgaagtgatactttgggaatatggaagtagcctgtttcttctcaacatacttttttttcccccttggtactcactagttgtagcatcatcatacttttacccattcatatttaaagtccattgataattcttgcctacaaacaattgactgtgctgttagccaaatagtgattttctatttgatcattccttctacattcattaattggaatcctgctgtaagaaaaagctgtttcttcatccttatatatttatgtattcaattatttatttatattagtaggaactcatgggtatttatgggttggaatttattactatcattatttcttatagtgctcattttgtctcaaaattggtcattcaaagctccttctggttggcatctgtgacctttcgacagatctccattatttttcagccggctccttactttctggcctcacgagatgctccaggctccgcttgtgctttccggccccagccctggaatcagttatttctcccaggaagccctggttcctttcatgggagaatgatgtttacgaccacgagcactactacacccattgctgtaatagtaagtgccggtgccttcacgccctctagtggtcagtcctgggaaatacacactcacacttgtgtactgttacccatattctacaaattaggtaaatgaggcacagaaaagttaggcgacttgaccaacatcacgagaaaataggtagtgaaactgcgagacagatacacaagtcctaataagtggaagtagcttcttcacacatgcacatcagcagaaagccacaagcccaatattccagcgtagacactctcttgggaaaaaatccagaattccaaagtattaaccctaatgacaaccatcatgtactgactacctgcctgggcactgggctcccacagtaacacatttattcctaaatatatgtaaatatataaaactaataactttatcttaaataaatatccattttatatattattatataaaatttattatagaaaactttatataattatataaaatatataggccaggcatggtggctcatgcctgtaatcccagcactttgggaggccgaggcagcatatcacctgaagtcaggtgtttgagaccagcctggccaacatggcgaaaccccatctctactaaaaaagtacaaaaattagctgggcgtggcggcaggcgcctgtaatcccagctactcgggaggctgaggtaggagaatcgtttgaacccagaaggcggaggctgcagtgagctgagatcgtgccactgcactccagcctgggagacagagccagactccatctcaaaaaagaaaaactattatatatacatttatatatataatttattatataaaaatgtattgtatataaatttatattaaatacaatttaatatgatgattaaaagttatatgtttattttaatacatgttagaagaaaatttaagcatatctcaaacctgtaattttatggataatattgcataggacaaagatgttttgtctcaaattcccgtcctcaagcaatccacccacctcaacctctcaagcagctgagatcacagacgtgagcccctgcaccctactaggacaaggatgttttgtaaagtaaatttatttaggaaaaagcataaagcaaataataataacagtggtacaagctgtagagaaaaatcataaaatgtctacaaatgtctgaggtttgcattttagttactcctaggaaattagggtcacatagcactgcagaaaaaaacaactgaaaatcgtagacctgggctttagctctagatttgtccatttctaggaccccactccctggacatctctgtgacctccctgctgggagtaaatccaaccttcccagacattagaaaacatgaggaaaaccttgcatacccagaggggtttctgtgtcatagagaaaataacactgagtttgggggtcccagggactctctgtgaggtgctgacagagccaatccctagacacagcagaggtcacttatggggagcacaggtcatcctgttaagggatgggggtcccaataagccttgcttctcacagcgtggtctaaggaactgaaatgtagattggagaaaaagaggaaaagaagacaaggaggcaggactgagaggggaggaggcggaaaggctacctgtgcagatcctcattgccacttacctttccccgcccccacccctggccctgggaagtgcttctgccctgggaggaggcttagcacagagagaggaaggacagcagagctgacagtcacagtagctctgacaagagcatttaatttatattaaatacaatttaatataactattaaaagttatatgtttattttaatgcatgttagaagaaaatttaagcatatctcaaacctgtaattttatggataatattgcataggacaaagatgttggcatctgtgacctttcgacacatccccattatttctcagcctgttccttactttctggcctccttattttctgaagcccaagctcctctccacagaggaggacaaagcagacagcagagcccatggggcctccctcagcccctcctcacagagtgcacatccctggcaggcgcttctgctcacaggtgaggggagggctccctgggagtggatgggaggagggagcacagagactggctggggtttcttggagagaacggggacctgagagggacagagggcttctgttggacactaaacaggaagaagggattacaacaggaaaatctaaataatctgaggttgttagtgaagaaacaatctcgattgttaatgttttccaagtgaatcatcactgagcagttaatgttgaaaacagatgacaataatcacaatttaagttggggtaatactcaagaaaaaaaacaagggacactaaacagagctctgtggcagcactcctcatataggggcaccagctgtgggggacgggtgaatagtgtacactgacacacacatattttgctttgccagtccagctgagtctgtcagggccgcttacagactccctgctgagtcctataaacagttgtgaccatggccttgatcagctagtgagactcatatttattcagtaagattaattaacaaaggcttgagtcaacaccgttagagggtaattgacattgtggacttcccaagtagaaagcaattaagcacctgtggcacatcaatggttagtcttaagatcacatgagtaaacaagctggctagacaaactactctgccttcctttgttactactttaatttgtttaactaaaggtaaagggaccaccttcagtcagatctattaccaaagttatgcaaagtttttggtcttccaagaagatttgtgtctatctctataactatctctaatatttttcccaccagcctgattgaactccaacagagctcttagccaacaacctcagccattggaaaataaatcccacgttgtgaagggccctgggaacactcatgagctcatccacaggagtccgcagcctgtcccaggcactggggtgcaaccaagatcacacaagtccctgttctcacagagctcatgctctcatagggaggaagacagacatgcaagggtatctagaatgtgaggtcaagtattgacaagagccctggagggaacacagcagcgaaatgtcagaaagggaagacccagggtctctagaggtgtcagggaaggggtctcccaaggatgccctaatgtgagcaggacctgaaggcagtagggagggagccaggcagacccctggggaaaaggactccaaacagggaaatgccaaggtcagaggcactgaaggaagggaggtcatgctgctgaccttggcccagtaggacacgcacgcgcgcgcgcgcgcgcacacacacacacacacacacacacacacacacacacacactccaaggctgagggatgaagagacctgtccaggacctagggccccatctttccacctcaatgcatagggcccagtattaactgatgctctctccccactcctagcctcacttttaactttctggaacttgcctaccactgcccaagtcactgttgaagctgcagaaggcaaggagattcttccactcacccacaatctgccttaggcttggctacaactggtacaaaggggaattacaggatatgtactaggaactcaagtaattaccccaggacctgccacagaggctgagagacaatataccccaatacatgtctgctgatacagaatgtcaccaacaatgacacaggatcctacaccctacaagtcataaaaacagatcttgtgaatgaagaagtaactggccagtttcacgtacacagtgatgtctcatgagctctgggtgttgggggtcagttctgcttcacacacacaggattttcaggcctgggctgtgcctgtgtccccctctacattacatcccatttgggggtttggacatttagtgcaagacacacacaggggagacaaacttccacagatcagaatttctttcctgcatccagaccctgcaggcacttgctacagaggaaggacagtctgatggggttggggggaggctcagtaaggggaggtcagtgtcagttccccctcctgggtcccctccccatggacgttccttgtaggaccatgtcagatcctggagtgaggggacccctgggaagcccctgttcagaaactcagccctggaaacccctgtccagtcccctgtcccaggatcctgactccatgtgaccctgggaagcctgtgccggggctgggttgaggcatcttgggcagggctgactgggaacaaggatttaccagctgtccaagggccatggctcttgcagctggtagccagccagggctcagcccccagagcctcatctgggcaagggcaaagcctcgtccttcacatgagacttggtatggagaagacaggtaagctccctaggacattagccgactgccctggggaacttaggagactccaagggaaggtcagcatccccaggggaggaatagagaagagaggatgttcccagcagctcattgtccaccagagatcaggcccagggaacactctgttggaggcaaataatcagagacggtgtattcaggcggttccttggtaccaacctttaggtcaggtgatcgtgaatattttaaaagtaattcacagacaacatggcaagccactgaccatttatcattgttggcagaaaaatcggagatctgtacgtttggaaaggagactttatttcatatatttttcattttatttttctatttttatttttttttagagaccggttcttgctctgtctcccaggtttgagtgaagtggctactcacaggtgggaccataattcactgcagcctcaatcccccgagctcaagcactcctcacacctcagtctcgagtagctggaactataggcatgcaccactgcacccagatagtttttaaaacaaacttttatcttaggttcaaagatacgcatgcaggtttgttatatatgtaatcaggggtttggtatacagattatttcatgatccaagtactaagcataatagccaataggtattttttctgatcctcactctcctccctaaaatttttttaagagacaggatcttgctatgctgcccaggctagtctctggctcctgagctcaaactattctaccacttcaacctcccaaaccactgggattacaggtgtgagccactgcacccaaccaggttatttcttacacagggttacagcctgcaggctggccattccccagggtagaagatgcagcctccagcagagaccaatagcaggcacttcaagggaggggaatgtggaagatagatttatgctgaatgagttggccaggtatacatattcaacaggttataggtggagctatggatactcacaaaggaagtacacgcacatgcgtgatcaacaaacatgcatgctacatgcaccccatgttcactttggggtggagaattcagatttaaatgtattaagttaggtcttatacatcaaaagatgaaacaagcattatggtactcagtgcaccgtgtctgtataccagcagaaccaggccatgctcagtggtctcttattaggagaaagttactgaaatcagtctcctgtccaattgaagtgtagttgtggctgttggaacaggggtcagttagccagtgttggtggatgagccgcgatcatttcaatattgcttatctcgaaggctagtgttactttagccgctagagagaaagaaaattctgtgttagaacatagcttattctttaaatgtaggaaagtgtggcttagcccttgcctgcatgaccttaggttgagtttataatttggtatcttatggccacagagagtctgttctgtcagtctcatgatctcgattttagcgttaatgctagtcagttgtcacctctaaacttccaaagggaggggctgtaatgaggtgtaacctcccatcctgtcatgatcaggaactctgggatccgcttggccaagaggccatcctttcagttcactggggaattagaattttatttttagttctcattgtgtgtcctattttactgaggggaaactgaggcatatgaagatacagccactggccagggtacacagactacagatggcagagtcactcgaggtcactccctccctccttcatgagagaactactgagcgagtgtgtgtctcatattgggccctgtcttgtgcagggtgtgagtggggagagaaagcaaagttctctcctttatcctctcataggagtgacaccaacacatcgggaaacacaggatttcaggtccagtgaagtgggtatagatctaagagaggaggcctggacattcccaacatggatctgatggttgaggcaggtgatagcgttctaagtaaaatctgattaattcttcatttgttcctcactccccagaccactgaggcgtggtattctccccaccgagctgtgaaaccctaagaagaagggagctgaaccagtgattgtgaaacagcatcattcatctggggtaatactcgaggttcattgtcccatggccatggaaaactaggatgcaggcacccagagtgaagttaagagtggaagtttcataggggaaagaaagagaagagctctctgcacagagagaggggtcctggggaaaatgggttgccacttccatagtgaaatgcagaaggttttatagatgagcttcaggaggcagtgtctgatttatacagggggtgaaagattgtttagaccagctgtgccatttgctggctgccccactctgatcttttgtcatgcagatggattgtctacctggccggtgccatgttgcctggttttttactgtacatgtggtaatggagaaaagggaggatggagtctccatgttgaacatacctggcttccaggcagcccttttctattggcacacctactggaattcacctgtgcaagcttccatcttgctcatctacatctgtagctcaatttttcaggctgctctttgttagaaaaggaattatcttgggctgctttttgttaaaggggaaaccttgccaaggacgctcttaccctcactaacttcctaaataatttctttctagctcctgtgtcagttggtctggggtccacagataccttaaggacccagggatggaggagaagacgtgccctcagcccactttcagttgagcacctccactgattgtccacagggtcagtggctccgaccccatctgagtcagcaacaccagagtcacagaagaaaaggatgttgtgatcctgacctgccccacagatgactctggaaccttatccagtggatcttccatgaccagcgtctgtgactcatggagagaatggagctgtcccagggccactgtatgctcagcataaaccccatcaggagagaggatgctggggagtatcagtgtgaggcctccacccaggtcagctccaggaaaaatgaccctctcagactgactgtgaaacaggaaacatctgagtcccctcttagaagttattaaaccctaaatcaaatattctttgtttggaggcattttattataaaaacttgatattcatatacataaactaatatgaagttaaaaattcattatacacctactgtttttagcttgatcttgcagtaaatctttagcttcattgattgtggctactatataaggagaccctcttttgtctgcgtgatttaagagcataacatgttaatgagcatctcttatttttttctttattggcagtagggcttaccctactattactagtgttcattcattatctagtattaatgctgcttcccgttttgtcattttgggttcatatccacctctgtagtaataatctctgaaggcagattttggtagactttgaaacacttgttctacttgaggttttatgtgcttcatggcttcgcaaaatgtaacagcttgcaaatcctgcagcagcggtcagttcagctgctaccactgcacaggccatggctccagcttggctcccctgccaccaccaggagggtggatcatcccagcccagaggccgcacccaccacctacttggctttaccagagagcaatgcagcagccaccacagtagtcacaaactgcccaagcacctttttcctctttaaagtggtggtgatgatgcatttactttatcgagctattgtgaatagtcaatgaaatcaggtgacttgcattgaatcaataaaaatgaaacaccttggaatgacattgtcattgttggcttaaggtcccattcagtaccagattttactgtttgttactgtcagttgcaccatctccacagtggtggcaacacatgtccctcagaggatggaccatgattgtgtgtgagggtgggaacacatgatcagctctcaggagtcaacagctccgtccctcctccagcaggaggtgtggatggtgcctgcactctgacatgggcaaagagaatcaacgggagggtgccatgcagagaggacaccccaaatgaaatgcacttcacacaatgcatctgcccatgtggtcctggccaggactggggagggaagggcttggagatcccagatttcaagctgaagccctgagacaaggtgcaaccgctgagagaaggagcactctgtggagagattcccacccacatctacagtctccaccccatcttatcccataaggctggcatatccctgaagggcagtgtgaagaagggacaagagtcttctctagggaggacactctgggccaagaccaaatgaaagctgggcactggcaaggacaagatttcttccaccatgagatttcaccattgtcctgaagcaatgaacccaggccctcttgctcatgtgaaacaccgcccggcctgaatcatgctaagggtgaacccaaggccctggacaccaccaccctccaggcctgtaccagcccctgcaggactcattcacctgaaccagcatcctccagtcctcaggctaaagggagaggtctttacctctttaagctacaggagattcccagatacccgtatgtccctggagagagagtccacaggttgtccacttggacctggcatagatcttcctctcaaacgccccaatgcccaggtgctcttcctcgaagatcttcctctccctacaggctctaggaactgtgagtccctgaactttcattagaaggaagctttcccttcatcctccctgaccctgtgaggggcagctgggcaaagtggacaccaagattaataactccagagggaaccctccctggagcacaacacccagggcctatgggggtgttccctggtggtcctggccagtggtgctgcccttctttctacttccaaaatcccagaccactgctgctctgactatgggctccactccctcaacccattcttttattaaatgccttttctgcacctgctggagtgattatatggtttttgttcttggttctctttaatgtgatggatcacatttattgatttgcatatgttgagccatactggcatccctgggatgaatctcacttaatcatagtgaatgatctcttttgatgtgttgctaaacatggtttgttaatattttattgaggacttttacatctatgtttgttagtgatgttggcctatgttcttttttggctttgttttggttggttgtttttgagagatggagtccccctatgttgtccagactggtcttgaactcctgggcttaagcagttctcccacctcagccttccaaagtgctgtgattacaggcaggagccaccacacccagcttgctttttgtttttgagagagcatcttgctctgttccccaggctggagtacagtgacacaaacatggctcactgcggcctcaacctcctgggctcaattggtcctctcacctcagcctcccgagtagctaggactaaaggcacatgccaccatgcctggctaatttttttctttttttttttttttaagagattggttctgactatgttgcccaggctgatctcaaactcctggcctcaagcaatcctgtagtgtttttttgtttgtttgtttgtttgtttgtttgtttttgtcctgtccttgtctggttttggtatcaggataatgctgaccttgtagaatgagtttgaaagtgttccatcctcttcaattttttaaagcattttgagtagaattggttttagttcttattaaatgtttggtagaattcagcagtgaagtcattcggtcctgggttttccttttgttacagtttcatgttggtttgttgggtttttctgccttttcatgcttccatcttggtaggttgtatgtgtccagaaagttattcatttattgtagttttattccattgtggtcagaacaaatgcttgatgtgatataaacttttttgaatttattctgactggttttgggacttaagatgtggtctgttctgaagaatgttctatgtgctgatgaaaataatgtgaattctgtaacagttagatagttagtgaaatgtcccgtaaatgccagttaggcctatttgatctagtgtgtagtttaactttgaagtttccttgttgattttctgtctgaaagatctggccattgctgagagcagggtgttaaagtcccctaattaatattgtattcagtctatctctccttttagatccactattgtttgctttaaatacttgggagacttgggagctcaagtgttggatgcatagatatttataattggcatctcctcttgctgaactgagcgctttatcattacatagtgactttctttgtctctttttatagtctttgatttgtagtttatcttatatcagtatagctactcctgctctcttttggtttccacttgcatgaaatatctttttccacccccttcactttcagtctatttgtatctttttacatgaagtggtttcttgtaggcagcatataggcagcattcagccactctatgccttttaattggagaatagagtccatttatattcagtgttcaatatttttaagtaagaacttactactgccactttgttgcctgttttctggttgttttgtaactcccctcttcctttcttcattttttactgtcttccttgtggttgattgtctctggtagtatgttttaagtcattgttttttattttcagtggatctatcatagattttttgcgttgcagttaccataagacttccaaaaacatagatataacaaagtatcttcaagagaagaaaaggtaacaacttatcttagatcacaaataaaataatagaaacagaaaaccccccaaaaaaactctactctttaatttcatcctttgcaaattttgactttgtctctatttacatattttatattacctttctccaaacaggtagctatttttttttaagacagagtctccctctgtcacccaggctggagtgcagtagtgcaatctcagctcactgcaacctccacctcctgggttcaagcaattctcctgcctcagcctcccaaatagctgaaacgacaggcatgtgctaccataccctgcaaatttttgtattttttggtagagatggggtttcaccattttgaccaggctggtcttgaactcttgacctcaaggaatctgccaaccttggcctcctaaaatgtattattgtttttgatagatttatattttgagactcatgctagagttatgattggattactttccacaattactatttgagtattctgggtttgtctacgtacttaatttcaccagtggattttataccttcaaatgttgttattgttgttgtggttattttgcatgttagtgttttttttttactttcacattgaagtatttagtatttaccctttagtatttacaggaagactagtctgatggtgtgaattatctcagcttttgtttgtctaggaaactttctctctcctttatattgaaggataacttcactggataaagtattctcaaatgtcaatattttttcagcattttgaaaatgtcatgtcactccctcctggtctgtatgatttccactgaaaatctcttgccacagaattggagcttctttatgccatttgcttcttttctctttctgttttaaaatcttctctttgcccttgacttttgagaattcgattattttatgccttgggggagtcttatttgggttgattctttcctctgatccattctgctgttgagagactctaataaattttcctgttcagcaaatatatttctcaattccaagattcctgtttgttttctttaaattatttcaatcccttcgttaaatttctctgataaatttctgaactgcttttccatgttttcttgaagatcattgagtttccttaaaactgcagttttgaattcttgattagagagctcacacatcaccatctcatcaggatcagtcacttgttcctcactttgtccatgtggggagatcatggttacctgcttactgtttcttgtggatgtaagtccaggtctttacattgaaggattcattatttattttagtctttgtctggcttgttttgatttttattggatagattttcttagagttctttactgctaggtcactacctccttttcatctctaagttacctttagggtttaccttggccctagtaaatgatcagagtgtgcccttcctaactgagggaggtcccaaaggggatatcctggcagtgtgggaaagctggctagatgtccatgcccaggatacctgtgaaacaaacctactacaacatggagctgctgaaacaccagtctgatttcatgtctcccttggctgagttacacagcagagtttccagggaaggagatggtagtcctgcctccccactctttgactgtcctcagggaaatttctcccttcgggcactcacaatgcttcttgtgggttaaggcagggacagggaacccaagattgtgcagaaactggttgcccgcattgatcttacatttcccagtgtagaaaccatgagttggggtaaaattttccacacacctggtaccaggcagaatggggcagggagggacattacagatggggaaatctgattcttttgtcatctgtctggagtttttttcacttctctgtggctctgaaaactgtttcattttcatatttgagttctggaatatatctggtaataattttggtgctgtatatttgtttttggttttctgtgtgaaggagtaaagccagcttgcttctatgccaccattttggaactggaactgagatatacaattttgatgtctactttgtgtctctgtgaggcaacagattcccaggggtttttttgtttgtttgtttgttttttccagatttgacaactgtcaaaattgggctatgaaatggagaagcagtatggataatcaccccattacttactaggtttcatgtaataagttttaatccttaaaggccccatttcaactcacattgggccatattcactatcttaactgaggtttcatgggatcccattttgtcaagccaatgtctaagtaccaaaaacacttctattttatttattgtctcagagcacctatgtccaatagagaatgttttacagcaatgggtatatgactccgggaaatttaggcaaagttacaggtaaattgagacatacctgtttttttcaattttatatttagttttcttctcaagataatagggacagagtgtttaaatttatgggattcccacgtgtggctacaatttgagccccagtattgattaaatccatgaatatttgtcaattagtgtatttagcaaatgtaaagttaaattagatcctatgttgtagagacacaaaagcaaattggtgcccttttaaaaatctttttttacataaattccttaatatataagttaataaatgaattttgaatttccaatagaatcaaagtatgaaattttactttgatttagttacatattatacatacataatttaactatttattatatatttatattaaaatattgtatgtgtatatatttaattaccttttattttttcctcctatatctaggggtttgttgtaaatgaataagtaacctagggctagcattatgtttgctagacctgtggtttgctcagtacttaaagtttaaagtttctcttttatttttcttggatttgtagtcaatcaaagtggtagtttcttttcttggggggtgaggttagccacctaaagctgagattcttgttttctgtctctagaatgataagaggaaaagatggaggaggaaaggtggtcagtgactctagggagtagcctctctctgggatgactccacaacgacgaaacaagcccgtcttttttttttttttttttttttttgagatgaagtctcactctgtcgcccagactggagtacagtggtgcgatcttggctcactgccgtctctgcctcccgggttcaagcgattctccacccaagtagctgggattacaggcacctgccaccatgccctgctaattttttgtatttttagtagaggcgaggtttcaccatgttggtcaggctggtcttgaactcctgacctcagtcgatccacccaccttggcctcccaaagtgctgggattacaggtgtgagccaccgctcccagcccaagcgcatcttttaagcaaaatctttaaaatggcttgtatttctagacggttaatgtctttttctttttcttctttctgtctttggatgtttacttgacaagttcctgatggtacccaaagccccctgttgttttaatcttacaacttgttagcagaataaaattgagggtggcctccatgtgcaccagcctcctaggcagctgtttctctttccaaggtgacccaatcaacccctgaggtgttgattgtgcaaccacagcaagaaatgcagaaacaagggagccactagcccgggattgccccatcacatgaagccacggctgtgtctgcagggattatccatggcccagggcctaaaattcgcatccaccttagtgactacagacactgccggtctaaccaggggcagcctcctgacaagattttactaaatggcactctgctatatccatcaggagaaccacagcttctccacacgttgtcacccatttgctttgctaacagaaatggtatcttgccctggtctccatagctcaccttggctcaaccttgggacagtgaaagaaaaagtcaatacatggcacctccatggggaaaataaatgggaaatgtcactcctcactctaaggaggagtggagttcaccctctgtggatgccttccctattaggattccagaaacacacctagcccttgccctagatggagaatcccccttctcatggggtagaccaccttgggagcacattacaggttcctactcggtaacaatttggggagaacaacatggcagcactctacagcagcaacacagcagcacacagtggagcaactgaattgcactgaacagaacggcctcaccagtgaggcagccacaccggcgaggatgttaaaagcctcagcagctccgagatatcttgtgctaaacagaagaggtagtctattgtgccgactacaccaatttcttaaatttgcgatctttaagatgcagagctcttgccaatgattgcgagagacataagatgaaaataaagatttattacttacaggtcctgggggatacaggccctgtctggaggacacacacacacacacacacacatacacccacacccacacacacacacagaggtcaggggcagtatggggaggacagagggggaacccatgggtcaaggcctttattagggtacagaatattattcaaacagattgtcctcagggagttttaattggtggatttaatgcaagcagacatgagatccaggtaattagaggtggtcactgcagcaggcagggtgtggggtcagtggggcagtcatacgggctgtatccggaagtcccatagggaggaggtcaccaggaggcagttgtataaatcagatatctgatcaatcacactgaggaactggaaggaggtggagaactggaaactatttcaaaggtgactgagccctgcttctggtatgagaaagtccaacttccatccaaaacggatgccaaggcattgtaaaattgtaagcattcacaaatactttcgatgcattcttatttagctgacttctagtttttacagcccaaatatcatcatttttcattcttatttggcaacattctgttaggtgcagcatgtatggagggcacctcctttattaatacatgtggatttgctctaattgtggttttttcattggttccattgcatggctacactatgatcttttacccacacccctgttgctggatttgaggctgctcgtcacttgtcacattgacatgaccttctgcagtgaacatcctcatacacacatctctaccatgtggagtactgttcctggagctcattccttcaacatgtatttatgaagtaccctgtgctgggctattggctggtctctggctttagcagagacagaacaggcaagcttggccttctcagagctcacagcacagggaggccttcagaagtaggatagtggtcagagcgtgtgcgcgttaaacatggtgaggtcaatgttgctgtagggactaaactgcagtcccatcagaagtatatgggaatgtccatctccatgtcctcacctttcttggcataattatttgagtactgcatgtgttcctgtgtcctattctttgcccacacatcatccatatttaccctcttaaccgtccatcctccaccttgtccctaagtgctgttgttaatagccctgtggtagaccagatgccaggagccctgagatatcctaagcagctccctctgccagtccttccaagagttctggttccacaggtgacacacctgaacacaggtaacccctgcaaaatctgtgattaccacgcaaggctgacagtgagtggtgggtgttctaggaggggccaccacctccatatgcagggtcagagaacactgagtggagcaggaggctgatgactttgaccacaaggtaggtggatgggtatgtttggctttatagggaagggaagggaagacaagggaagacgaagggataggggtggggaggggaaggggaggggaagggggaggggaaaagggaaggggaaggggaagggaaagtttgggcattgcaggcaacatcacaaaggttggaacctgcctctggggtacaagaacagcaaggaggccacccaggatgcagctgaggacggaagacatggggagcagtggatctaggggagaagcagactgtgattgaccttgggggctgggcggtgaacagaggtgtgttatgtgtgtctgtcccagtcacagatatgaggaggagtggggccgcaagtggcacctggttcggtgggatttcctaatacctgctgttcatcagagcctctccatgtagcatgtcagtatagatctgaggctgtgtctgggagggggagctggtggtccaaggcagcctgtggtgcttactgtccctaggggtgggaggagagggatgaggacacccctgcgcagtgaagcctcaggtgtgtggagccacaggtatctcacctggtgattcttgtcagacacgtgccttgggtgaggatgtcagggtgagagtcactgtcatttttcttaaaatgtacatggcatggacccaggtattcagggacccagagaacaaggcccctggtgagagagggttgcatggagctgagcagtttcatgtgctcagagtgggagggactcctgaaaagacaaagcctcaatcctacctgtcaggagccatgcctatttccaggagagatgacaagggtgacccaggacagacattgagtgtgaggacaggacagagaggaccctggtggcttctcaggtgtgggaatgtgaggtggggtttgttcccatccaaagcacagaagccctccattgtaccctgagtgctgtgtgtgactagcagggacactggatgggttggacctgtgcctcttgaaggcagggctggatctgtaggaccagagatgcctctgtgggtaagaggtgatgggaatgaggaagatgggggtgactgtgaacctattttagttccctggggatgtgtgctgaagaggaagtggcctagaacattccttttctgggtaaagtgaagcggggaagcagtgtggattctttttgttttgttttgtttttagatggagcctcactctatctcccaggctggagtgcagtggtgcgatctcagctcactgcaacttgtgtctcccaggttcaggcaattctcctgcctcagcctcccgaacagccaggactacaggcatgagccaccaggcccggctaaattttttgtatttttagtagagatggggtttcaccatgttggtcaggctggtctcgaacacctgtcctcaagtgatctgcctgcctcagcctccaaaagtgctgggactacaggcgtgagccactgctctcggccgcggtgtggattcttcagtgtgttctgatagccatgtgtcactacacacttgttctttatgtcttcacatctcatcctgttgcattttaaagcatgttcatagtatgcagttttgcctaataaagcattctcatatatacatacatatagatagatgatagatagatagatagatagatagatagatagatagatagatagatagatagatagatattcagacagatcttcaggccccacttgtccctgaggaggattatttgcctatggaaagaacaagcagatggcaaaggcctctgacaccaagcacaaggctcagcctggaggagctcacagaggagcccaggagatcctctcaagcatctcctcaagggctcagctggggatggaggagcaggatgctgagctcagcggatgctccaggctgagtgatggatgtgcttcaaaggtcaggcacagagaatcagacgttaatcatggaaggttcccaccatgttgtaggcagagacagtggcctgagtgtcaggggcagggagactcaccatgaggccaaagcaggctgtgagccccccaagagaccacatcctggatgcagcaagcagccctgcagggagtggcagcagatgtgctaaaaaccatgatatccagacatgcaaaggtttcgcaatttatggattagagaagaatagcattatccctgtaatagcttcctctttcttacactctttctcatatagaatagaatgggcagcttttcctgcagttccctcctatctgcatgctccctgctgccacctggaaattagcctcactgagtcactgtccgtggtgctgatgtccatgaactattgaagggccggtgagttgtgatctttcagtcacctctgctttctgttattcttagcaactaagcatgtcaccaagaagaaggtggagaggtactaggggcatggagagccctccgtctccctctctcaggatctggagggtgctggggatgttaatgcaggaactgacgccacagtcatgatgaacccatccaggtgcccatgtgtagtttgtagtgaacgatgatgagaagatggccttgagaggagtgatggacagaacaagggcctctcaaagatgtgtacatcctcatccccagatctgtggacatgtcacgtggtaaaggacactttacagattaaaggaaggatcatgagatggggaggttgttgtggtttatcccaggtgcgtccaaaataaccacaaggctccttccttttaagtgagagagggaggtgggaggaggtggagatgtggggatggaagcagggcacagaatagtttcaagatgctgtgctgctggctttgaagatggagaaagaggacacagccaaggttgcaggaggcctctaggaggtggaaaaggagaggaaatgcactcttccctggagcctctagaaagaacacagccatgtgggcactttggttcaggtttctatgtcactaagcttgtggtaatttgtcacagcctcaacagaaaactaaagaggcctcaccttgtctcatctgacgctgtgtgcaggtgggatcaggggtcatttagagctaaatcctgatgcaaatcccgatataaaacaacccattgcgggttgttttcttacctctcatctcaggacgaacaacctgtggcagtggcagaacactcttgggaactgtggctctgtgctttagtgcaggcaccagctcacttgtgggaaggtggcacctggttcaagtgaacctatatgagatcatcacccttccaggggccctcagggaagggctgagaactgctgtcccaggtgtgtggaggagctgcaggcgagatagggctgtgggccagggagaggagcagacaggttgtcccatcgccatgggagcctgcatgagctttagatgggggagtcctgcacctctgacctggatgctcctgtgtaaagagttggcttgctcagtgagatccatgccagggggtaaagtgggaactgatgagcaatgaggggccagagtcctgggtagtgctcaaggactgaattatgcgtctgtattaatcttggttgctctgacagcccctctctgtgccccaccagggataaagatgtcctgagcagtagccactgggacagaggagaacctagtggccaggtataagcacacaggatcctggatttggggacaggtaagttcatttgtggaggacagtgatagactgggcctccagggcctgggtgaagagggcagcaggggtcaggacactggaggctgcgtaggggccacagccgcaacctataccacccatggttgctcccgcattgctcaccttttgtggacatcagatggccccatcttctgtgctcctgagaccccacatgcattcacagagggacccaggctggggctgtgcatggccttggtccctggggtagtgtgaggacagctgagcgctcggctggctgggcagggctcatgtgaatcttgccctttcctgtgtagggcccaccccagcctgactcccaacccctatttctgcctcccagggaagagagactgtggttgagacaaggtggagatattttccctgtgtgacccgggagagaatggacacggagtttcaggtgagtttctgctaagttcccgtgagcagaaaaagagccaatgagaggaagggtcctctttattcagatcctttcctggtgaccccgggtgggccacaggcccattcactttccttgcaagcccccgcttcctgtggtgatgagaggcctttgtcccggcccacccagagcccagggcaacctgtcagggtctccagatattcagcagggactcccatccctccctgtccccaggcctgtgtctcctcaggactcagagctggttctctggctcaggctccatgtccttccccgtccccagggctgggagcttcggggacgctccatcaacccacaagagcagctcccagaggaacctaagagaccacatctgctttgtggtcgatctggcagtaaatgtttgcatcagagtatagcaattcctgtaaaaacagagaagaggcctcaacccctgtagccttctcagaacagtgtctggcatctcccaggctctgggcccacccagggcttctctggggctgaacctggctgtgctcagggggtccctgttcccaggcccctccctcctctgctcaccaccacctgttctcattttcactgcattttcctgaatctgagctcagccaggtgctggtgggggcagatcctgggtcccctggagcctgcgggaccagaacatccatggcccacactcacctcatagatgggagtggctgttctggggctgggtagaggggcctgggcaggggagagaggagatgtcaggggacagggagggagggtcacggaagcccagcctggaaggttcctgtctctgatcggccaggacttacttccctgcctccacttccactcatttcccctcaggattgaccagctctgcccctgagctcagcctcccagtgtggacacaacaccctgacccctgtcctggctgggcccaccccgcacccttgttaatgtgggcctctgactgatggtcccagtgtccactctgcacctgctggactccagggttctcctcaggtgtagagggtcccggggaggggtcagcacatggcgtgggtggtcctggccctgtagagaggcccggatcctggccggaggcactcactttgacctgactgttctggggaaaggtgggtcagtgctgtgctgtggggttgatggtccccctgccctgagcctgcactgttgggaccccagtagaaaagggctggggagggaacaggcttaccgagaaggtggatctgtgagagggaccatggcctggggacagagacaggagtgagcagcagggtgggaggagagcctgggcccctcctgcaggagagtgtaggggtcctcagctcccagagaatcagggagagggagcctcttcccaggggagacctgagcagctgaggtcgaggaggtgacccacgacccagagcccacagatcagtctgaacaagacagtcggggtcccctgtgtcatgtttcctgacatcctccttgcagccccaaagaaagggtcagaggcccccagggggtgactggcaggagtggacaccgtagggcaggcctaggggctcccacacctgggctgaagggacactcaccaggggtggaggctgggggcggctgctccctgaggtcacgctggatgctggccctaggaaaggtcaggattattcatgagggtgcagggagaaatcacaggtttaggggcagaataaaggacaaggaagggactccattttcaaggactggagtgaaggcctcctgtctccatcagtttcgtggtaggagcggccgaggacggggagctgaggataggccttaagcagtcacgtctgtcctggccagagaggaaggacccccccaggcagatgccgggtgaggagaacattgacccagggacccaggaaagggactgaggactcagggagggaatcagaccacctgcgtttgcctgagaggaagggtcaaggccccagagggaaagcagggccggctgtgtgtgcaggacactgggggagctgggggcatggggaggcaaggagcatgtatcatattctcccagaactcagtatccctgccatggccagaccctcctttcaggcctggagatgctgaaatggggcaatggccttgtcctctctctctccaccccttggcaagagacataaaggacagcaggtcctgaggtccaggttctcccatctcacacctcagggacatcaatcacgatggggtgctgaccctacccagcctgtccaggctttgccactccccactgcgtgaccatgcccaggacccccaccatggatctcaagcctgcaaatccctcctcactgggtgggtaaattcaatgaacagcagaaggtaccaggttctgagcactcccgtcttatctccctccctccctccctcccttcctccctccaggcagctgtggctttgctgtgttagggaactaggacagcactcaggggtgcaaccttaactgtgccacattcataaaggaagaggcagcctaggatcagcagctggcaagggaggagccatggaatgagagagaaggattccttgggaggatgcggaaagcctggccctgaatacagggcggggtctccctcctccctgactggggtcagcctaggggtgggaggaggctggggaaaagctgcggtaccttccagtcctggagagaagcagaaaacacaccagggcggccaccagagccaccccaaccaggaccccagtcacgatgccagcgacggcccccacaggaaggcctgggacgttgttttctgcagaaaggggaaggcaaaggggacaaggcccaagtttgttccaagggaaaccataagaggcattgcagggcaggggcatagtcagggaggaaggaaatgctccagagcctgagtgtggtctgttgggctgtcctcatagctgactcccttgctctccacggttgcaccattttctgtgtctcagacttgacacactgggatgtaccaactcctacattctcccacaggtgcttgcacctcgccctgctcctgtacctttaaatcccttcttcctctcatgtcacacctcttccctctgttgcttttttctttttcttttttttttggatggagtcttgctctgtcacccagactggagtgcactgacgcaatctcggctcactgcaacctccatctcccaagttcaagcgattctcttgcctcagcctcccaagtagctgggattacaggtttgtgccaccatgccaggctaatttttatatttttagtagagatgaaatttcgccatgttgtccaggctggtcttgaactcctgacctcagatgatctgcccgcctcggcctcccaaagtgctgggattacaggcatgagccactgcgcccagtcttcctcttgtttcttcttttccattccatgattgtcacagagagcgagccctcactgtcaactccatgctgatgagcggggatgatgttcattgactattttcaggggtcttccatgtgccaggcacagtgggcaccaacctacctacagctcatctcatcctcacatcaccttgagggagaggggcatcaccgccatctgcagagttagaatctgagacttacagtacctcagtaagtcaaggaaggtcacagaactcgtacatgataaaaccaaatttttactgcattgttcctgattttattgccaataacaacatcaaaaaaataagaatactagttgatagcatcagttgagctctcgccctgtgtataactctgctttaatctctttaatctcctaataaacatcctcacaaccactctgagatccaggtgttacagtgagtttgatctctagcatatatatacatatatatagatagatagatagatagatagatagatagatagatagatagatatagtagctgttgttattctttcttagcctgtccatctctctgctcacagcatccgtctgttctgcacattgtctatgctttccattgcagcctttagcatattagccagtattgttttttgtttgtttgttttagagatggaatctcgctctgttgcccaggctggagtgcagtggcacaatctaggctcaccgcaacctccgcttcacaggttcaagcaattctcctgcctcagccttccgagtatctaggattacaggcacccaccaccatgcctgcctaattttttgtatttttagtagagacggggttttgccatgttggccaggctggtatcgaactcctgacctcaggtgatctgcctgcctcggcctcccaaatgctgggattacaggcatgagccaccgctcctggccccagagttgttttaaattcctggtctgataatttcaacatccctgccacatccctgccacatctgcatctggttctgatgcttgttctgtctttcgaactgcatttttttttttttttttttttttgcctctagtctgtcttgtagtttttgttgaaagccaggacatgatgtactgggcaacaggaacttgggtgagcaggcgttcagtgatgcggtggtgagtggggggagggaggggttctgtggtcctggatagagtctgtgccctgggctgtgaatgtcacaagtgcctctcagttttttctctcctttaggtgggacatgatggctagagggggctggagttggatatttcccacccccctcagtcagttaggctcccataaacccccagcaggtgaggctctggtaaaataacgatttattcctgctaactaataactatctgaacttgctaagaagaacagatgctctggcatatttttaaatatttactttttttctactccccagaaaggataggggggattattatgggatattcatagtgagaaccaggtagagctccagggtgtaaggcaaacgtgtgggactacccgcaagcctgatccctcccctgaaaaccttcccacagccctgcagccccagggtcagatgagactcagctcccaggggcagatttaggagaaacgggccagatgaatgagacatgggtcttaggctctagagggacagaaaacaggtgtggccagaacctcctaggatcttgtatccacatctctgtctctgaagaggttatagatcattcctacattcaatccctccctccttcataagagaactacagagtgtgtgtctcacgttgggcccagaacctcctaggatcttgtatccaggtctctgtctctgaagaggttatagatcattccttcattcattccctccctccttcatgagagaactacggagtatgtgtctcacactgggccctggctggtgcagggtgtgaatggggagagaaagcaaagtcctcccctttatcctcctgttggaatgatacccacacatcagaaaacacacgaaaccatttcatgtccagagatgcggggtgtggacctgagcgaggaggcctgaacttccccagcactgactgattgttgaggcaggtgatttagttaagaaaaaactgattaattctgtatttactcataactctccagaccagaatctccccctccgagctgtagacacctaagaagaaaacatccgaaccagtggctgttctgaggtccacagacacctagtaaggcaccagggatgaaggagaggacgtggcagcagctgcagacagccctcatgtgactctgccagctgcgatctgcccaccgtggccggtgtctgtatctctctgtgcctcagtttcccctccatacaatatgtaaatggaaaatggtctgaggcttgccactttgtctgtgaatgaactttaaattattcacaggatctgacatgaagcttggcacagaggaggtgttcacatcaacagcatctgttatttgcctccatgggagagcacccctgggcatgatccccggtggacaagaagctgccaggaacattttctcccctctgttcctacccctgggccactgactgcccaagggcatctcttaagctcctcattcagggggccaatgccctagtaatcctgtccccctgccctctccaggctgagtcccagggaaagtggtaggctctgtccttgtctagatgagactctgggagctgagccctcactgatgagaagcttcaggaaccacagcccgcagacatctggtaaatccttgctcccagtaagccctgcccaggagaccacaccccagccctgacacaggcttcccggggtcacacggagtcaggagtcctgaggctgggcttttgtgaggttcccaggacgccctcaggccaggccctgacccagttctccagggtctttctcagggtcaggttcatggggagggcatggggtgcttggctgagactgacctccccctgctgaggcccccccgcccccgccatcagtgtctgcagggcctggatgcaggaaaggaattctgatctgttgaagtttacctaccatgtgtgtgtcctgcactaaatgcccaaatctcaacacgggacaaaatgcagagggggatgcaggcacagcccaggcctgacaatctcatgtgtgtgaagcagaactgaccgccagcacccagaggtatgggggaatcactcacggtgtacgtggagctggccagttgcttggtcagagtcgtaactggcatttatggttcgtagggtgtaggatcctgcgtcctccagggtgatgttttggaacagcagggatccattggggtatactgtctctcgaccactgtatgcggcccctgggatatttgcttgaatgtctgttatataaccagcaatgagagggctcccttctgccgttttccccttgtgccaataataggcttgaatagtttctgaaatattgcaggccagtagaagaacatcctttccctctgcagcactggacggcagggcttcaatagtgaactggacagtggtgggcgggtgccagaaggttaaaagtgaggctaggaggtgaagacagcatcagtcaatactgggacctatggagtgggatggaaagataaggccctgggtcctcagcaggtctcctcatccctcagccttggagtgtgtgtgtgtgtgtgtgtgtgtgtgtgtgtgtgtgtgtgtgtgtgtgtgtgtgtgtgtgtccctgggtcagcagcatgacccccattccttcaacagcttggaccttggcatttccctggtggaatcttcttccccaggggtctgcacggctccctccccactgccctcagatcctgctcacatcagggtgtttttgggagacccctcccctgacacctcctctagagaccctgggtcttccctttctgacctttcccagctctgttccctccagggctcttgtcagcacctgacctcacattctagatctctttaggtgtttgtcttcctccccatgagagcgtgagctctgtgagggcggggacttgtgtgatcttggttgcaccccagtgcctggcacaggctgcagactcctgtagatgagttcatgagcattctcagggcctccaagtcctgaggtttatttcccagtgtctgaggttgttggctaagagcagtgttttatgccctggttatgtttttatttgaagtgtcatctggtatagttattatcatttttcaaaatgtagtggccagtgatgattaaccaggacgagagaacacttgagattttcctgccttttaccaattccagttcactgagattttcctgttgtgacccctgcccctctctgatgttctctcccttatccagcctccaacagaggccctcagtcccctctcagagccccaggagaccccagccagaagccctctatcccctcctacccaagagaccccagtcagtctctgtgctccctcttcccaccactcccagagagtcctcccctcacctgtgatcaggagcccctgccagggcctgtgccctccacggggagcggctgagggggggcccatggtctctgctgcctgcttgtcctctgtggagaggagctgggctccaggaacgctcttgtcagagctgctgtgactgtcggctgtcggggctgctgaccttcctccttctgtgctgagcctcctcccgggcagaagcacttcccagggccaggggcagaggcggggctcttcccaggtcacccctctgcccctcccctctcatttctgccttttttgtccctccttcccctttctcttctgtgtacattacagtttcctaaccacactttgagaagcagggttggtggagtcccctgtccccagagagggtgacttgtcacccctgcactgaccctttgggaatgtcaccacaaacagaggtactctggggtctcccaaacttggggaactgtttccttttgtgacacagagacccagctgggcccccaggtctcctcatgctccccaatactcagggagtgtgagatgatacccagcaggaaggtgacagaggtggctctgtgggatagaaaatggggggcgactacgggggggaccagtcctctctctccagtgtcaccagccttgcctctgacccagggacagagatccaggcctgggggtctcaggaggatccccagctcctggatgtggagggaggtgtcctgcatgtcctgggaagagaggactgtggtggagggaggtgggtggctctgggttctgctgtccttgaggagggattcagggagatcctccctctccgtttctgttggctgagctgtggcttagggcctgtgcatgttctcccttaccatcccgggtggcctctgtcctctgtgaaggtgattgtcctgttgtcactgtaccttccccatgcatgataccaggagaaagtggagaactgagcagagaatcctggcagagcaggatcctcagaggctccaggaaggatcaggagagacagagcaggcacatgggagggactggaagggcctgctggagcaaagtatggaaaccaggcttcacctccacctccttagcaaagccagattcctgtccaggggaatccatttcctgtgttgtctgcgtgcaatgttgcccctggagagcaagaggaaccctgtggtaaaagtcaggggcttccccagggatgctgaccagggtccacgtggtatgagttggccctggcccctgggcagaggtgggctctgacctccagactgcagggtcaggtcatccttggtcctgttcactgtgggtccccaggatgtccaactccatgcagtgcaggatgagctcagggagaggacgagagttgtccagagcactcctggtcctgatttgggagaactgtcctgcaggcggatgggctgcctcagaaagagccatccgtccccaaggtttcaaaagaagggcccagggaggtgtctctgggggtttagagagagggcactggcctgggaggtggtcctcggtgtgttctgtgttcctccatcacaacactgggagttccgcctccaggtcatctgtgtccctgtctgtcacctgccccaggcctctccacagggcccaggagctggggcagctcctacctgcaggctgcaagggatacctggttcctgtattagagcaggggaggccccgtgaccctcagtccctctgagatggaaacaaaggcagatcctgggttatcctgtcccctcctgcaggagaagttcccctggatcccctggtgaaatgtctgcagggaccataggcagatgtcccaaatactggggatctcgaggctggggaatcactccctgactttcttgtggtcattctgccctggtggaagatccacctgggatcgaatatccggagtttgtgtcagttttggtgtgtttgtgagaaagacatatgttagagcctggagggaatgtcagtgaatgatgtcagggaatgaattgggtttgcccctcactgttagaaagaccctgaattccctcccgatgctactagggtaaaagccatgttcttatgctcatttctctaaggaaatgcaaatagagtttattaaggcgtttctggccaactaaggtggattttgtcatgtagacacaatatagaccataatacatgtacatatgcaaaaacacacctaaacacatatccacaaacaaataaaaatcttacagctttcattttagaattttagtgatgagatagtaatacaaactcactagttgattaaagtcaactggatccaattgtatttctgacaaattggaatcgttaacatggataaactttatttgcccctataggtaatataatgaaggctgggggaaatattttgggtaaagcagtttctaatggcagtgtaacttataaacaaataaacaaatgaaacctctacagtttcagcatcttttttttttctgtttcacatgagtttaggattaaattttcaattgcttacactttagctagaactggctgaattgtataagaaaaaaaaatctccaactagccttaaactagattttttgtgtgggttggaggggggcgggtggtggtgatgtggtttgcttgattaacaaatgtggatgaggaaggattttagctttttttcctggctttttcttttttgcctctgcatggcaaaagaagaaaaaagtttatgtcggacagagacaccttaaattattgctctgagttcaagattttgacctgtatgatctgagagcctaacttttataaccatgtatttttttaattattgatttttaattgtgctccattataagcaattattagttagacaaacttaaatttacatttcctaaaggtgtctaagttgtttcttatcatggagttgtttaatttgtaaagccattaattttaaagcccttcaagatttcttttttaaaactctgggctagaatgccataagcagtgagttttatctcaacaccagtagaaaagtcagcagattcaaagtaggtagagaaaaaaaaatagagaatttagaagactctacatttccaccctatagatgcagggctttttaaaacaggttgaatgatgatcattgagtactgaattttccttgatgtaattttgctcataaactttaaaatgtgcacaagaaagaaccataaaatgtagccagctggagccccagaaaacctggcatgccttaatgcttgagagccccattccatttcttattaatctcttgaaagtgaagaaaattttacaaatcctgccagagaatgtcaggcatttgtaccagtgttttagatggtggcaaccacgctagtggctgttaattagccattttgtgcccgtcatttagaatgtctatttttttgtgttctgggatgattttcagaagcaagcaaggggaaaagagtcaaaccaaataaaaagaaatccagataagagcattcacaagaattttaacccaggcatgcagatttttaaagtatttaaattaggcacacaggccaaaatggaagtaaattcaccagaatagacttgcctcacaggcagaatgtaaattttgtagaatccagagtacgtgatctagaaagatatacgcctttctctcagaaaggacttgctagaaaagacaaaaagttttttttttttttatcatcccaggagaaatgtatggtcttttactaaggcagccttatccaaatcagattccaaataaagtcaagagcttctaccaaaaagaggctctgcttgagcaaagacttgtcagggcaggaaaggtgagtgtggaagcagagagctcaaacttctcaagtgagtagtgcacactggttcaaagatcacagatttcttctgatagtgatctttcccagatcccacttctgacaccatatatggtaacaaacagagtgaggctttctatgagaaactgatgtttatttgggagtagcacatttcaatggaaatgcatgtgccatagtaaaatgatctacatattcgagtttttaaaggaaaaaattgggattattatctagtcattttgaaaaaaaaaaaaaaaaactagctacaaagatcaatagccagaatgatgccactgtgaggttctataggcagttgctgggcagatgtccttgcagaagtagttttcatataaggttgtgatggcctttgtataaacttgtggcttttgcagagtcttttgtgatagttttgttatcaggcatgaggatcctctcttcatggtcttctctggctctatttgtcagagttttttttcacactagtgactcattttgactctgacaactttcacatctgttaatacttaaagaataaataaaattaaaaagactgaagtctagtagaaaagtaggcaaatatataaacagtttacagaagaaaaaacaatttgaatgattcgtagacatatgaacaaaatacccgcacacatgcaggagaaacggacattgatattatcctggaaaggtgaggatcataatatggcccagtggttttaaatgctgaaaaattccatttgataacacaacgtgtgggaagaactttggtaaaaattgtacttcctaactttgttgggtgacatgaaaatttgtaccaactgtgtggcatcaaatttgtcaacacttatcaaaatttaacatatgcattctctttgcctcccaaactgcactgcaaggaatttatcacacactcatgaaaaatgacacctaatcacggtttctcatggcagtgatggcttaacagcaaaatactgaaaacaacctacatttacattagcatagttaaacaggttatatacatttacacaatggaatatgaggcagatatgtaaccaacagggaattgttttagccactgatgcggaaactcctccgtagtgtttttaaattatatggcataaacaacatatagcctatgtgtggttttcacattgaatgtgatcttaattttttttttttttttgagacagggtctcatcttgttcccaggctggagtgcagtggcatgatcttggctcactgcagcctcaatctcccaggctcaagtgatcctcctgcctcagcccccgccccccaagtagctgggactacaggcatgtaccaccatgcctggctaatttttgtacttttttgtaaagacagggtttcaccatgttgcccaggctgttcttgaactcctcagctcaagtgatcctccagccttggcctcccaaagtgctgggattacaggcgtgagtcatcgtgtccggcctaatctttttaaactttagagttgagttcatatgtatttattctataacttttgttttttaacttaatacttctgtatttggggtatttttttctattgtccacttttctggtgtgtttccatccattgtttttgactgattcacttctttgacttaatgatatggtatatatatatatttttttttctttttttgacagagtcttgccctgtcactcaggctggagtgcaatgatgccatctcggctcactgcaacctccgcttctcgggttcaagtgattctcctgcctcagcctcctgagtagctgggattacaggtacgtgcctccacgcccagctaatttttgtatttttagtaaagatgggggtttcaccatgttggccaggctggtctcgaactgccaacctcatgatccacccgcctcagactcccaaagtgctcagattacaggcgtgagccaccgtgcccagccccatgatatagtatctttttcctttaatgttatctcctacatctcatcacaaacatttatgtatacttcacaattaccttctggttcccaaattatgactcttgcacagtgaggattcttcgagatctctccctgttttcagcactccctgaaatgttttcaaagcttcctttatattgacatttatggatattttgagctagtacagatttctcctactccaagatatggattcacctgtgcctccaggagcactggctcgtctaataaaaataagaattagaaaataaatcatatcacagaccacaaactggacccatggggtgaattttaattgttttccatgaatacaattgcagagaggataatattgttaccagtggaaggtgtccaggttcttggtgtattggacaaaacgcacaaacaaggcaataaaagaatgaagcaaaaaacacagattcatttaaatgaaagtacactccacagagtagaagtggcctcaagcaagcagctcaagagtgctggttatagaattttctggagtttaaatatgctctagaggtttcccattggctacttggcttactccctatgtaaataaagtagtggcctgcaatcagtctgattggtcgtggaaggcaaccaatcagaggctgaagtgaagttacaaagttacatccctatgcaaatgaagactagacccttgaccagtctgattgttgcaggagggaaccaatcagaagtactttccatttctcatctgcaatgcagaaaaaggtggggttgtaaagggtgtaccctctgtccttttgttcttgggcttgggaagtcgaggttgctttagagtggtcaaagggcagggctggggcagaccccaggggcagtatggaggccccccagtatgtgtcctggaggagccgagctctcacactcggaatctgtccatccctgagttagcacccagttgcctggaaccccctcctccccacaacgaccccatgacctgtgcagagtgggtgccctcagcacctgcagcctctccctatcctgatagcagccatttttcttattttctcaataactcaggaggacacaccctcacctgtggacctagctctttttttttttttttttcaaattatacttgaaggtctggaatacatgtgcagaatgtgcagttttgttacataggtgtacatgtgccatggtgatttgctgcacctgtcaacctgtcatctacattaggtatttctctaatgctgttcctccccttacccctgagccccccaacaggcctcggtgtgtgatgttcccctccctgtgtctatgtgttctcaatattcactgagagacctctgttctgttccattggtctatctgttttggtaccagtaccatgctcttttggttactgtagccttgtagtatagtttgaagtcaggtagcatgatgcctccagctttgatctttttgcttagcattctcttggcaatatgggctcttttttggttccgtatgaactttagagtagttttttctaattccatgaagaaagtcaatggtagcttgacgagaatagcattgaatctatacattactttgggcagtatggccattttcacaatattgatttttcctatccatgaacacggaatgtttttccatttgtttgtgtcctctcttatttgcttgagcagtggtttgtaattctcctcgaagaggtccttcacatcccttgtaagttgtattcctaggtattttattctctttgtagcaattgtgaatgggagttcactcatgatttggctctctgtttgtctattattggtgtataggaatgcttgtgatttttgcatattgatttagtatcctgagactttgctgaagttgtttatcagtttaaggaattttggggctgagatgatggggttttataaatatacaatcatgtcatctgcagacagagacaatttgacttcctctcttcttatttgaatacctttatttctttctcttgcctgattgcctcggccagaacttccaatactatgttgaataggagtggtgacagagggcatctttgtcttatgccagttttcaaagggaattcttccagattatgcccattcagtatgatattggctgtgggtttgataaaaatagctcttattattttgagatacatcccatcgatacctagtttattgagtgtttttagcatgaagatgtgttgaattttatcaaaggccttttctgcgtctgttgagataatcatgtggtttttgtcattggttctctttatgcgatggattacgtttgttgatttgcatatgttgaaccagccttgcatcccagggatgaagctgacttgatcatggtggataagctttttgatgtgctgctggatgtggtttgccactattttattgaggattttcgcatcgatgttcatcagggatattggcccgaaattttcttttcttgttgtgtctctgccaggttttggtatcaggatgatgctggccacataaaatgagttagagaggactccctctttctctattgattgaaagagtttcagaaggaatggtaccagttcctctttgtacctctggtagaattcagctgtgaatctgtctggtcctgggcttttgttggttggtaggctattaattactgaatcagtttcagaacttgttattggtctattccaggatttgacttcttcctggtttagtcttgggagggtgtatgtgtccaggaatgtatctatttcttctagattttctactttatttgcatagaggtgtttatagtattctctgatggtagtttgtatttctgtgggatcagtggtgatatcccctttatccttctttattgtgtttatttgattcttctctcttttcttctttattagtctggatagtggtctatctattttgctaatcttttttaaaaaccagctcctggattcattgattttttgaagggctttttgtgtctctatctccttcatttctgctctgatcttagttatttcttgtcttcttctagcttttgaatgtgttttctcttgcttctctagttcttttaattgtgatttcagggtgtcgattttagatctttcccactttctcatgtgggcatttagtgctataaattcccctctaaacactgctttatctgtatcccagagattctcataggttgtgtctttgttctcattggtttcaaagaacttatttatttctgccttaattttgttatttacccagtagtcattcaggagcagattattcagtttccatgtagttgtgcagttttgagtgagtttcttaatcctgagttctaatttgattgcactgtggtctgagagactgttcgttatgatttccattctcttgcatttgctgaggagtgttttatttccagttatgaggtcaattctagaataagtgctatgtggtgctgagaagaatgtatagtctattgatttgtggtggagagttctgtagatgtctattaggtctgcttggtgcagagctgagttcaagtcctgaatatccttgttaattttctgtcttgttgatctgtctaatattgacagtggggtgttaaagtctcccactattattgcgtgggattctaagtttctttgtaggtctttaagaacttgctttatgaatctggatgttcctgtattgggtgcatatatatttaggacagttagctcttcttttgcattgatgcctttactattatataatgcccttctttgtctttttttttatctttgttggcttaaagtctgttttatcagagactaggattgcaactcctgctttttgtttgtttgtttgcttgctttccatttgcttggtaaatattcctccatccctttattttgagcctaagtgtgtctttgcacatgagatgggtctcacgcaccaatgagtcttgacgctttatccaatttatcagtctgtgtcttttaattggggcacttagcccatttatatttaaggttaatattgttatgtgtgaatttgatgccatcattatgatgttacctggttattttgcacattagttgttgcagtttcttcatagtgtcgatggtctttacattttggtatgtttttgcagtggctggtactggttttttctttccatatttaatgtttccttcaggagcttttgtaaggcaggcctggtggtgacaaaatccctcagcatttgcttgtctataaaggattttatttctcctttgcttatgaagctttatttcgctggatataaaattctgggttgaaaactgttttctttaagaatgttgaatattggctcctactctcttctggcttgtagagtttctgcagagagatccgctgttagtctgatgggcccttcagattgagaaatccttagattggagtcacttcaaatccagaagttatgaggactgagctgggcaatcttcattccataatacattttttgaaaagtacatgcccttcctattctatgaaaagctgccctggcctcagagatgaacacaactggcaagcctgctcatgtagtttggatgtttctcccctccaaatctcatgttgaaatgtaatccccaatgttaaaggtggggcctggctgggtcatgagggcaggtccctcatgaatggctaggtcctgtcctcatgatagtgagtgattttgtacaaggtctggttatttagaagtgtgtggtgccaggcacagtggctcatgcttgtgatcccagaactttgggagactgagggaggaggattacctgaggtcaggaactcaagaccagcctggccaacatggtgaaactccatctgtactaaaaatacaaaaattcgccagacttgatggtgcacacctgtaatcccagctacttgggaggctgaggtagaagaatagcttgaactcaggaagcagaagttgcggtgagctgagattgtgccactgcattccagcctgaatgacagggtgagactgtcatggagtgacacctcccccctgccacttactaccactctcaccatgtgttatatctattcctcttccctttctgccacaagtaaaagcttcactggaagccaaataaatgctgtcaccctgtttcttgtgcatcatgcagaaacatgagccaattaacttctttttttgcaaattatctggtctcaggtatttctttatagcaacacaaaagtggcctaatacacctgccttccccccaatacatagaagtttatatgaggaacagggactgatctttataaagccacaaagagtgctaagaaagaatctcacaaaagtccacaggagaaaaattcaacctgatgatgaggttgcaaaatctgcgagctgagaaggagttcctattgtgggtcccacagagatgtctgggagaactccaaggtcaccatagggtggtctggggtgaaagagaggtgccaccttatccttacagattgtcacctgagcaaagactcttgatcttctgcagagggtcagggccatcccctggatggtttcctttgcacacctcatggtggaacctgagagctggctgggatctctgggaaggaacatggccccaggccccaggaaactctcagtcattcatctcctctctttgtccacagggtcagtggctcactcctccttctgaaccagcagcttacctccagcaaaatgatcctttcaggctgactgtgaaatagcagacatctgagtcctctgttataggttattaaatctaaaatcaaatttttctctgcttggaggcattttattataaaaagttggtactcgtacacataaactaatataaacttgaaatttactatacatttacatttcttagcttgtccttacagtaaatttttagcttcattgatcttggctattatataaagagaccctcttttgtctgggtgatttaagagcataacatgttgataagaacctcttactgtttcctttattggcgttagggcttacatctagtattagtgctgcttcctgttttgtcattttgggttcaaccccacctctgtcgtaataacctctgaaaaatattttggtagactttgaaaaacttgttttacttgaggctttctgtgcttcgtggcttgccaaacataacagcttgcaaatcctgcagcagcagtcggtacagctgctaccactgcacaggccatggctccagcctggctcccctgcttccaccaggagggtggatcatcccagcccagaggccgcacccactacctacttggctttaccagagagcaatgcagcagcgaccacagtagtcacaaattgcccaagcacctttttcctttttaaagtggtggtgatgatgcatttactttattgagctgttgtgaatagtcaatgaaatcaggtgacttgcattgagtccataaatactaaacactgtggactgacgttgtcattgttggcttaaggtcccattcaacaccagataccactgtttgtctcagttgcaccatctccacagtggtggcaacatcgtttccctcagaggatggaccataattgtgtttgagggtgagaacatgttatcagagggaaggaaaactcctggtctgtggaagggccacagtgtccctctaagccaagtcacaacattgtttgagaaagtaccaaccaaatttccgctgtgttcactgagcctgagtctgagacattcacctgtttctcccattacaggctgtggaccccaagcctcccatgacaggagcagtccctctccacctatttttggtcagggctgtgcccttccgggtttgcctggggcaggaagtcacagccagcctgggtatccaagggcaggggtctgtgttcttggacccaaggggaagtgaatggtttgagctctggctatgtggatttgagctggcagcctgagccccagaagaagagaagatacacgggacattcaggctaactgggtcgctgcagtcggcattcactgggttctgggttccactctcatagagtcctgtgtcactacctgtgacactgagtaaagtgaaggtcctgttgcccttggacatcttcagcctgggactggccaggaagctctgaccccttactcaccacaggtatgttgtgtcctgagtctcaggttcacagtttaacctacagagtctttgtcctccacgggggtcctgttgccttgatggagggctttgtaagctctactgtgcagataacagagagaagactgccctatggggcaccctgattactccatagtgaacatggaacgcatatagcatgcacgttttcttatcaaacttgtgtaagtcaaaccttcatgaatattaatagctcctcctaaaccctattgaatgtctacttggccaacctgttcagcgtcaaaccctgttccaccctccctccttcaagtgcctgctattggtctctgcaggaagctgcacttgctagcctgaggaatggccagcaggcaggctgtaatattttataaaaaataaaggcaccaggtgcaatagttcaggcatgtaatgccagtcctttgggaggccatagagggaggattgctagaggataggagttggagaccaccctgggcaacatagcaagaccccatctctaaaacaattttttaaaaaattagcagagcatggtagcaagtgtctgtagtctcagctatgatggaggctggtgtcctctcccttattcccacttcagcagaaaccctcgatccctctcagagccctgccctccccaggagaccactgccagtctctattctccctcctcccacccactcccagagaatcttcccctcacctattaccaagagcccctgccagggaatgaatcctctgcggggaggggctgagggggtcccagggtctctgctgcctgctctgtcctccactgtggagaagagcttgggctccagaaatgctcccaagcatggctgctctgactgtcagctgtgctgtttgtgctgaaactcctcccagggcacttcccaggtgggcctgaggtgtggtctcagcccaggatgcttctctgtcccctcccttctcacacttgcctcctttttctttgccttttccttcacttctgtctacattttggctcccccagaacatgctttgagaagcaactcttatttggaccgctgtaccataacaggatgagctgcgttcctctgcgctgacctctgctgtgtcctgggtgtggatctcttatgcaccacgcagagagtccctagggtcccccaacccagctttttcctctatgacacagaaacccctctgtgcattcagagtcttcctagtgttctctaatggctgggaaagttggatttactcccaacaaggaggtcacagagatgtccagggagagggttcctagaaatgcacacatggggctaaaacccatgtctaagattcttagttttcctttatgcagcactatgagactttaattttatagacataactgaagatgaagctgcctggtgctatagtattatgtctcccaagcctcagatatttatagaccatctctataatgttttctacagtttgtaccatctttattattattgacttcatacattttttctaaataaatttactttacaaaacacccttgtcccagcagcgtgcaatggcttacattgtaatcccaggtacttgagaggctaagatggggggatcacttgaagccaggagtttgaaacaaaacatccccgtcctttgcaatattgtccatgaaattaaaggttttgtgaatttgcttaaaattgtttctaacatgcattaaaataaacatataactattaaagtttcttaaaagcttatttatgttccacctaaagtcagttttgggaaacactgatacagtggaataaccatggactttttatatccagagagacctgggactcactactggttctgtcacttaactgtgtcatcttgcacgagtcacttggcttctttgatcctcgattccataatttttaaaatgatgatgataaaatccactttgcaagctgttaggaataagatttgcttcagtcaggaggtggaggttgcagtgagctatgattgcaccactgcactccagcttggatgacggagcaagactctgtcaatgaaaaagaaaagaaagagagagagaaaagaaagagttacttccacttgttaggacttgtggtgcgtctgccattgttttcatttcccagttccactacctatgtgctctgtgattttgatcaagttgcctaacttttcctcatttacctaatttgtaaaatgtggggtttaccagtacactagtgtgagtgttatttcccagctctgaccactagagggcgtaggagcatcggcacccactggcaatggatgtgtcggtgcccatggtttaccaacatcattctcccatgaaaggaaccagggctccctggagaaatagctgatccagggctggggcaggaaagcacaagagaagcccggagctttttgtgaggccagaaagtaaggaaccactcgaaaaattatgggaatgtttcaaaagattacagggagcttagaattaccaattttgggacaacatgagcaacataataatgatagcaatggattccaacccataaatatccatgagtccatgctgatataaataattgaacaaagaaataaataaggaagaagaaatagctctttcttatagcagaattccaattaataaatgtagaaggaattatggaaataaaaaatcactatttggctaacaccacagtaataattgtttataggccagaatcaagaaccatccacagattctaaaaattaatgggtaaaggtaagatgatgctgtaactattgagtatgaaggaggggtcaggggaagtaaggtgagaagaaacaggctactggtttgttcccaaagtatctgtccacaagatacttattaattacaatgagatgaatagtaactttatagtagagaaacctggcaaacaccacctgaaccaagcgcttaaagtgaacctcatcggtaatgagagatatggacatcctggggctccaggtgggatgtcctgagaaagacacatcacttctgtgctaatcttacccaaaatgcataacctaaaacatcccaaggaaacaggagacaaacccaaattgagaggcattctacaaaacaactgaccagacctcctcaaaagtgtcaaggtcctgagagagggaaagagtgggaaactcccccaggttggaggaggcctaggagatgtgacagtgttattcagtgtcagatcttggattggatttgggagcagaaaaaggacatgagtgggatgattagcaaaatttgaatatttgtagatccccttggttaatgttattgcaccaatgctagttccctgatatgaacaattatattagttatagaagatgttatttgaaaaaaaaagctggataaaggataaactggaaccctatttttaaagatttttgaatgtttaaaaataaacatgataaatgaggccgggtgtggtggctcacgcctgtaatcccagcactttgggaggccgaggtgggcggatcacgagttcaggagatcgagaccatcctggctaacacggtgaaaccccatctctactaaatatacaaaaagttagccgggcgtggtggcgggcgcctgtagtcccagctactcgggaggctgaggcaggagaatgacgtgaacccgggaggcagagcttgcagtgagccgagatcacgccactgcactccagcctgggcgacagagcaggactccatctcaaaataattaattaattaattaattaatttaattagattaaataaataaacgtgataaatgaaaagtcaaaattttaaaaatgctttagatttctgtgaggccaaaatgagtgtatagtgcttagaacaatgcttgtgacataggagttcttaacatgtcagctattattataagtacttttataattaataagtaatgttataaggaaagagtaatctgttattataagtaatttatttcctaatgtcctcatatattctcatatttttttcctctctgctgttaaatccatatagagcatgtacttggttattttaagatataagattagaggaggtcgcggcgccggaggccccagaagggtcgaaggcgccgcgggctggggtcggtggcttagggagcccgtctggccatggtggccgcggctggtggttggcgcggctgcgctgcggcccggggcagtgcggagccaggacagtcgcggcgctgacgcccgcgggccccagctgcagatatgaagcggagccgctgccgcgaccgaccgcagccgctgccgcgaccgaccgcagccgccgccgcgaccgaccgcagccgccgccgcccgaccgccgggaggatggagttcagcgggcagcggagctgtctcagtctttgccgccgcgccggcgagcgccgcccgggaggcagcggctggaggagcggacgggccccgcggggcccgagggcaaggagcagccgcctgccttggcctcccaaagtgccgagattgcagcctctgcccggctgccaccccgtctgggaagtgaggagtgtctctgcctggctgcccatcgtctgggatgtgaggagcccctctgcctggctgcccagtctggaaagtgaggagcgtctccgcccggccgccatcccatctaggaagtgaggagcgcctcttcccagccgccatcacatctaggaagtgaggagcgtctctgcccggccgcccatcatctgagatgtggggagcgcctctgccccgccgccccatctgggatgtgaggagcgcctctgcccggccgagaccccgtctgggaggtgaggagcgtctctgcctggccgccccgtctgagaagtgaggagaccctctgcctggcaaccaccccgtctgagaagtgaggagcccctccgcccggcagctgccccgtctgagaagtgaggagcctctccgcccagcagccaccccatctgggagggaggtgggggggggccccccccacccggccagccgccccgtccggtagggaggtaggggggtcagccccccgcctggccagccgccccgtccgggagggaggtgggggggtcagccctccgcccggccagccgccccgtctgggaggtgaggggcgcctctgcccagccgcccctactgggaagtgaggagcccctctgcccggccagccgccccgtccgggagggaggatgaggggggggtcagcccccccgcccagccagccgccctgtccgggaggtgaggggcgcctctgcccggccgcccctactgggaagtgaggagcccctctgcccggccagccgccccgtccgggagggaggtgggggggtcggccccccgcccagccagccgccccgtccgggagggaggtgggggggtcggccccccgcccggccagccgccccgtccgggagggaggtgggggggtcggccccccgcccggccagccgccccgtccgggaggtgaggggcgcctctgcccggccgcccctactgggaagtgaggagcccctctgcccggccaccaccccgtctgggaggtgtgcccaacagctcattgagaacgggccaggatgacaatggcggctttgtggaatagaaaggcgggaaaggtggggaaaagattgagaaatcggatggttgccgtgtctgtgtagaaagaagtagacatgggagacttttcattttgttctgcactaagaaaaattcctctgccttgggatcctgttgatctgtgaccttacccccaaccctgtgctctctgaaacatgtgctgtgtccactcagggttaaatggattaagggcggtgcaagatgtgctttgttaaacagatgcttgaaggcagcatgctcgttaagagtcatcaccaatccctaatctcaagtaatcagggacacaaacactgcggaaggccgcagggtcctctgcctaggaaaaccagagacctttgttcacttgtttatctgctgaccttccctccactattgtcccatgaccctgccaaatccccctctgtgagaaacacccaagaattatcaataaaaaaataaattaaaaaaaaaaaaaaaaaaaaaaaagaatggactttcccaggccagctgtggtggctcacgactgtaatcccagcactgtggcaggccaaggcgggcagatcacctgagatcaggagttcaagaccagcctgaccaacacggagaaaccccgtctctactaaaaataaaaaacattagctgggcgtggtggtgcatgcctgtaatcccagctacttgggaggctgaggcaggagaattgcttgaacccaggaggcagaggttgttgtgagctgagattgcaccattgcactccagcctgggcaacaagagggaaactccatcaaaaaaaaaaaaaaaaaaaaggactttctcaaagaaaatgtatttaaatgtctgcaccaataattccagcatgtgtatgaataaatatgatatgtcctttaaaaaaaaaaaaaaaaaagatataagattaggtctgacgtggtggctcacacctgtaatcccagtgctttgggaggccaaggcaggcggatcacttgaggtcaggtgttggagaccagcctggccaacatggtgaaacctcgcctctactaaaaatacaaaaattagcgggtgtggtaggcgcgtacctgtaatcccagctacttgggaggctgaggagggagaatcgcttgaacatgggagactgaggttgcagtgaacagagatggcacctctgcactccagcctggacaacagagcaaggctccgtttcaaaaaaaaaagacataaaataagattagattttattttgagaattattttagggatagaggagctattatttcctttagccactaacagtagctgaaattcaggccggattgcaaaactttgcttggctgagaaacaaagcttgagccaggctgccacccaccccacgcggtttgtgatggcgccccctggcggcgcagcgagctttccggttcctcaacctcgtgctttaggagcgatattttattttattttattttattttatatattgttagttcaatagtttttggttacatggataagttctttagtggtcatttctgatattttggtgcacccatcacccaagctgtgtacactgtacccaatgtgtagtctttaatccctcacccttctcccaccccttcccgctaagtccccaaagtccattacattatcccgatgcctttgcattctcatagtttagttcccacttataattgagaacatgtgatatttgtttttccattcctgagtttcttagaataatggcctccagctccattcgagttgctgcaaaagaccataatttctttcctttttatggctgagttagtagtccatgttgtatatataccaccttttctttatccacttgttggttgaggggcacttaagttggtaggagcgactttagaaattccactcagtctattccttgaacgctttctagctcacattgtggatcctttaatcttcacaacatgtctctgtaagaagtggtatttttaacatttattttatttattatttattaatttattttgacagggcctcgctctgtcatccaggctggagtgcaatggtgcaactatgctcaccgcagcctcaaccacctccagttcatataaccctctgcctccgccttccagtagctggaacctcaagggcacaccaccgcacctggctaattttttaaaaaattttctagagacagggtctcactttgttgccagggctggtctcaaatgcctagcttcaagtgctcctcctgtttcagcctcccaaagtgctggggttacaagcttgagccaccaaagctggctaagaaggagtatttaatcctcttaagatgataaaactgaggttcaaaagagtaaagcaacttgcccagggttgcaaagggagtggcagagccagaatttggacctaggtccccctgacttccaggctgagtataaatgtctaggtgaatctaaatgtgtatccaggtagagaagtattggtgtagagcaggtgttgtcaattgggggtggtttcccccacagagacagttggcaatgtctggagatatttttagttttcataacaggggtggggatgggagagatggaaggctgctattggcatctagtgaagaaaggccacgtggatgctgctgaacaatgcacaaggcacagaacagcccccaccacaagcaattgttcagcccaaatatcagcagaactgctatgaagccctggttggacttagaaacctgaagatgcattcttgcagttagctaatgtttgccaagtactgagctggacaacgtgagggatatggaaacagtgcaccactttgtgctgccaaggaggctgcagcctagaaggtcaggggttggaggcaggagaggcgcatgaaggccttcaacataaggcagcagatgataagtgtcaagaacagagtgtccagtagggctaggccagctctcaggagggagaccacatgtctggctgtgggagaaactgagggaagctgtggaaaggtggttttgagctgggtgtgtgagcaaagttgagctgatgggaaaacacaagacctgttcagggaagggcaaaaagtctagtttgggtggggagagagtatttttttattgagtagagagggaaatgctggaaaagcaggttggggctagagctttgagtccaggctaaggactcaagcctgggtgtctgtcacagagatggaaaagcctttcctctcagaatggttgtctagaccgtagggctacggggctcagcagtttcccgagtgctctctctacaaaggaggggacattggaaattgtagtgtaggagggtgaacatctcctgattttaggaccaatttcatgctgagtatgtgacaaacccatttcacatcaaagtggcccttgggtagatggtgttcccaagtgaaaatttacatggggtgagctctcttctgcgtggttgctctgtgaaagcctgggccactttatactgaaaacccagagcagacttgaagcccctaagcaaaggtttgctaccctaaaggtgagttgctacagcaggacttgctatggataaagttgcaaatatggacactacctggtgacaggatttttctagtttattactttaccattaaatagcattaagacatgtttgtggcatgtatggtacactgtaaagactataagtaaggatttcctgaccttctatacatgtacagttgcctttaacaacctcccacctctgccaccatgtttggccccagagaaatgcattactcttctggaaaaggggttagaggagaaggcaagagagcaaatatttgttgagctagcgtgtgtgtgtgtgtgtgtgtgtgtgtgtgtgtgtgtgtatttgccagctaccgttgtggacactttcccatacagtatcttaactctcttgacaccgtttgtatataagtacagtttacttcttttgataaaggaggaagctggcactggaaaagactaacttgccctaatcccctgtagctgaaagaagctacattttgatgcatgtgtggcccactatgccacattttctcctcccttttttccattcataggcaattaatcttatccacctggacttgggctgctagagaccatggtcattagcattagtggcagcaacagaaggaggaaagagattagaactttcattgtgattgttggtgcagctgtaagtcatttgaagactgtatggaagtttcccggttggaggctcctgatctctggggatggctcaggccagggtactcagcccggtggtctgcactttagtcccaggtcagtgtttccatctgagggcaagagcaggtgaggtgatgctggccttactgttaagtaacagattagacgatgtgctttccagaaatgtaggagataaaattcctcaaacaaaaaaataagacagaaggtgttgcagcagagagtttaatacttgcaagatggccaagcaaagaggatgggagatatttttcaaatctgcctccccaagaatttggagactagggttttaaaggagtgtttggagagcaggggactaggaaatggacacggctgattggttgggctggaaatgaaatcatcgggtgtcaaaattgtcttgtgcactgagtaagttcctgggtggagctcacaggaccagttgagtcagtttcttagtgtaggtcaacagtctgggtggtgtcaattgatccaccagaatgcaaagtctaaacaatatctcaaactccagccttaaatttcacaatagcaatataatctataggagcaattaaagaacatataaatcttgtgcccactggctacgtgactcctgagcagcaggtaattataaaaacaaaaaaaaagatggggaacaatgactgtttgctgtttaactctgcctatatcttagctaaattcaggcccctaccataattctaaccttgcaacatttcatttgttttacaaagttggtttcaattccagaacaagaaggggattagttaaactataaattccttctatagttaggctggcctatgtacaggaataagcaaaggtggatagtttgtgaagttagaagcaagatggagccagttacattggatttctctcactattaaaattttccaagggtggtttcagttccccctgggcttaagcattccttattcctgaggtgtgagcagatgatgagatggaaggggttgataaccactctaacttcttcctgatgatagggggcatcattggggtttattccaggataggagaaatgaaactgtcttgctgtcgtcttcctatattcacgaatgcctggttggggacccaagttttgcatgacaaggatattagtattcacatccccagccgcagcacagtacttaagtgaacagcagactgtaagtgttgagccctaatataaagagtgaaagcccaagtctcaagagttcttgtggaactgatctgaaattttaaggcatccagataaataacaccgagaaccaatcagacatggggtcaccggtaaagacctgctgtaaccatgaagtttcttgggaatttctttctatccagatttcaacttctcctgaggtgtttatataggtgcaacaagtggtgtttcatattgcacaaattcccctttgtctagccaacaggaaatcaagcaccaacagattgtctaggactacgtgagctagcaaactgaaggaactttgttgaaccctaagggtttttgcagtttcttctagacaatcaatccgaaggtagcagacaggttcctgatcatgtctctgttgccataaacaccataactaggaacaaatatccctagaaggctctgccaccaggtatcttgatgtctgcctgaagtcctcgttttgttctatggggaaatcagtggaatttatcaccatgaagataggctgagaagggagttacaaaatgtcccggtaagcaggagcccttgatatgcaggctattgagacacaggtgggctcatcctaatagagcctgcagatacctgtatgaactggatgaattcctctctttgcaaggtcccaaagtaacttggggttcctggcctatcagaaagtggcattctttacttacttcacatcagaaatcctgtaaaggaactgcatagacaaggtacaagaccagctcttccaaggggcttttattggctctataagtcaacttcaatttctgaatgcaggctgctcattccaaagatagctcactgaaaggaaaattcaagacagggaatcagaagctgtccatgaaaggggataagatcaataaatggcaaaagtcacagagatatcaaaccagaaaaatctgcctgagccagacatcaaacccagtccactgcagtgagagggcaaaccttagccactgagctacagtgtagggcagtctccattgctattcccagaagtaatctagagcaggcagtgttcagcttacagaagatttttttctaaatttttaaattaattaaaacattatagaggagacaaacagttattcctacccttttgccagcttgtcagcttcctggattccctttgtctgtggcttccagaagaccagagttggggtcaagccatgttataaaagaaaatcatccttttccacttcatggaatcataagcaaaaggcctcccaattttgcaagatgcagcccaatgggctgcacaggagagccaaattaacatttcccattctggctgaagtgatatacacataacaaaacacagacactagtcacccaactcagcacccatgtatcaacctgacaaagctcaaacttgcccttgttggcccctatcatctttgatccattcagggtatgaagatataacctctgaccaggagttcaatgggtagtctctgggaaagatgggaaagtgactgtcaccctgagttaggctggctgagtttccactagcgattccttcagagttcaccaaatgtgactacccagataaacagctcccagagttaggcctgctgagcttctgataacaagcccttcagggaatcccctccataaacataaatgtacataacaagacaaagacagatgaatacaaattcaagaagggagggaaaaacctgcagtgaccccatggtcagggctgaaggcagcgagtgcactgcgagctttgggtttctgtggtcagcaagccagagcagcacctcttgggtgggctgagcccaccccacaccctcagcgcgctgaaacacaagagtttagcactcaaggggatgccccaaaatgctgccggtgctgcccctggacaggactgtcctccagcacatcctcagccactgaggagccatcagcttcagctccagctccatgttcttcagctgtcccaattcccggcagctatcccagaggtgtggagctatctcctatgacagttctgatcacactgcattatacctcatgtgctaggagatgtacatgtaaggagccaagcaggatttgaatctgaaagaagagattctcaactatatattgattttcatgttttccacttgggctcttcatgccagaattaaaaatttccctagatattatctgtcactaaaaggtatttgtgggaagatggtggacaggaagcaggactacattgcaactccagctcagagggacagagtggtgtgtagaatcacattgtgaactcttgctccagaactattgcaggaatataccaggaaagctgagagaatccacagatcctctgaaagaagcagattgctccggcaggacccaggagacagcccaaatactgtgctggtatccatggatgagagatctgaagatgatttacatcataggtctctgtgcagacactcccagtaccagcctggagcctggtagccttgctaggtggctagatcctgaagagaaataacaatcactaaaattcagctctcaggaagccatatccctcagaaaagggggagagtactacatcaagggaacaccctgtggggctaaagaatctgaacagcagccttgagtcccagatctttcctctgacatagcctacccaaatgaaaaaaaaacaaaaaaacaaaaaaagaaaaacagaaaaacaactctggtaacatggcaaaacaaggttctttaacacccccctccaaaaaaaaaaaatcacactagctcaccaaaaatggatccataccaagaagaaatccctgatttgcctgaaaaagaattcagactatagattattaagctaatcaaggaggcaccagataaaggtgaagtctaattcaaggaaatccaaaaaaatgacacaagatatgagaggagaaattgtcagtgcaacagatagcataaatgaaaaacaataaaaacttcaggaaataaagaagactcttagagaaatgtaaaatgtactgaaaagtctcagcaatagaattgaacaagcagaagaaagaacttcagatatcaaggatgaggttttcaaattaatgcaatccaacaaacacaagaaaaaagaatttaaaaaatgaataaatcctccaagaaacttggtattgtgttatacaaccaaacctcagaataattggtattcctgaggaagaaaagaaatctaaaagtttggaaaacatatatggggaaataaacaagaaaaacttccctggccttcctagagacctacacatccaaatacaagaagcttaaagaacacctgggaaattcaatgcaaaaagatcatcacctaggcacattgtcatcaggttatctaaagtcaagataaagaatcttaagagcagcgaggcaaaagcaccaggtaacctataaaagaaaacccatcagattaacagcagatttctcagcagaaaccctacaagctagaaggaattggggccctatcttcagcctccttaaaaaaaagacaattatcagccaagaattttgtatccagcaaaactaagcctcataaataaagaaaagatacagtctttttcagacaaacaaatgctgaaagaatttgacactacctagccaccactacaagaactgctaaaaaggagctctaaatcttgaaataaatcctggaaacacatcaaaacagaatgtctttgaaacaaatctcacaagacctataaaacaaaaatacagttaaaaaaattctaaatctcaatactaacattgaatgtaaatgacctaaatgctccacttaaaagacacagaattgtagaattgataaaaatttaccaaccaagtatctgctgctttcaaaagactcacctaacacacaaggactcacataaacttaaggtaaaggggtgggaaaagacattccatgcaaatggacatgaaaagcaagcaggagtagctattcttatatcagacaaaacaaacattaaggcaacagcagttaaaaaagacaaaaagggacattatatgatgataaaagaccttatccaacaggaaaacatcacaatcttaaatatatatgcacctaaatttatgttcccaaatttataaaacaattactactaaacctaagaaatgagagatacagcaacacaataatagtggggacctcaatactccactttcagcactagaccagttatctggaccaaaagtcaacaaagaaacaatggatttaaactataccctggaacaaatggacttaacagatatttacagaacattctacccaacaaccacagaatatacattcaattcaccagtatgtggaacgttctccaagatagaccatatgataggccacaaaacaagtctcccaggatctgagcagaaataaatgaaattgaaacaaacaaacagaaacacaaaagatgaataaaacaaaacgtggttctttgaaaagttaaataaaattgataggccattagcaagattaaccaagaaaagaagagagaagatccaaataagctcaattagaaataaaacagaagatattacaactgacaccacagaaatacaaaagatcattcaaggctactatgagcacctttatgtgcataaactagaaaacctagaaaaggtggataaattcctgaaaagatgcaaccttcctagcttaaattagaaagagttagaaaccctgagcagaccagtaacaagcagcaagattgaaatggtaaccaaaaaattaccaacaaaaaaaaaagtccaggaccaaacagattcacagcacaattataccaggtattcaaagaataattggtgtaaatcctactgacacttttccacaagatagagaaggaggcaatcctccctaaattattctgtgaagccagtatcaccccaataccaaaaccaggaaaggacataacaacaaccaaaaaaaaaaaaaaactacagaccaatatctctgatgaacataaatgcaaaaattcttaacaaaatactagctaaccaaatccaacagcttatcaaaaagatataatctatcatgatcgagggggtttcataccagggatgcagggatggtttaacattcacaagtcaataaatgtgatgcatcacataaacagaattaaaaacaaaaattacatgatcatctcaatagatgcagaaaaagcatttgacaaaatccagcattgctttatgattaaaatcctcatcaaaatcggcatacaagggacataccacaatgtagtaaaagccatttatgacaaagccacagccaacataaaactgaatgggaaaaagttgaaagcattccctctgagaactggaacaggacaatgatgcccactctcaccacttctactaaacatagtactggaagtcctatccagagcaatcagacaagagaaaaaaataaagggcattcaaatcaataaagaggaaatcaaactgtcactgtttgctgatgatttaattgtacatctagcaaaccatcaagactccttcaaaaagcttctagaactgataaatgaattcagcaaagtttcaggttacaaaatttatgtacataaatcagtagttctgatacatcaacagtgaccaagctgagaattgaatcaagaactcaaccccttttacaataactgcaaaaataaaataaaataaaatacttaggaatatacctaaccaaggaggtgaaatatctgtaaaaggaaaactacaaaacactgctgaaggaaatcatagatgacacaaacaaatggaaacacatcccatgcccatgcatagatagaatcaatattgggaaaatgaccatactgccaaaagcaacttacaaattcaatgcaattcctatctgtattagtccattttcatgctgctgataaagacatacctgagactaggcaatttacaaaagaaagaggtttaattgagggtatggcaaggtggccaaataggaacagctctggtctgcagctcccagtgagaccaatgcagaaggtgggtgattctgcatttccaactgaggtacccagctcatctcattgggactggttaggcagtgggtgcagcccatgaaaggtgagcagaagcaaagtggggcatgacctcacccaggaagcacaaggggttggggaactccctcccctagccaagggaagccatgaaaggctgtgctgtgaggatggtgttatctggcccatatactgtgcttttcacacggtccttgcaatccacaggccaggagattcccttgggtgcctacaccatcagggccctgggtttcaagcacaaaactaagcggctgtttgggcagacaatagctacctgcaggagtttttattgtaccccagtggcacctggaacaccagagagacagtaccatttactcccctggaaagggagcttaagtgaggcagctgagtggtcttgctcagtggagtccacccccacagagcccagcaagttaagatcaatgggcttgaaattctcgctgccagcacagcagtctgaagtctatgtgggaagcttgaacttggtggggggaggggcgtccaccattagtgaggcttgagtagatggttttcccctcacagtgtaaacaaagcctccaggaagttcaaactgggtgcagaacccacagcagcatggcaaagccactgtagccagactggctctctagatttctcctctctgggcaggacatctctaaaagaaaggcagcagccccagtcagaagcttatagataaaactcccatctccctgggaaacaacacctgggggaagggatggctgtgggcacagcttcagcagacttaaacgttcctgcctaccagctctgaagagagcagcagatctcccaacacagcacttgaactctgctaagggacagactgcctcctcaagcaggtccctgacacccgtgccacctgactgggagacactttccaacaggagtttactgagacctcatacaggagagctctggctggcacctggtgagtgcccctctgggatgaagtttccagaggaaggagcaggcagcaatctttgctgttatgcaggctccactggtgatacccagacaaacagggtgtggagtggacctccagcaaactccagcagacctgcggaagagggggctgaccattagaaggaaaactaacaaacagaaagtaataatatcaacatcaacagaaaggatgcccaagcaaaaaccccatccaaaggtcaccaacatcaaagaccaaaggtagataaatccgcaaagatgaggataaaccagcacaaaaaggctaaaaattccaaaaatcagaatacctcttctcctccaaaggatcacaacaagggaacaaaactggacagagaacgagtttgacaaattgacagaagtagacttcagaaggtgagtaataacaaactcctctaagctaaaggagcatgttctaactcaatgcaaggaagcaaagactcttgataaaaggttacaggaactgctaacttgaataaccagtttagagaagaacatgaataatctgatggagctgaaaaacacagcatgagaacttcatgaaacgtatacaagtatcaatagctgaatcgatcaagtggaagaaaggatattagagattgaagatgaacttaatgaaataaagtgtgaatacaagattagagaaaaaagaatgaaaggaatcaacaaagcctccaagaaatatgggactatgtgaaaagaccaaacctatgtttgattggtgtaccttaatgtgataggggagaatgggaccaagttggaaaacacacttcaggatattatccaggagaacttccccaacctagcaagacagaccaacattgaaattcaggaaatacagagaacaccactaagatactccttgagaagagcaaccccaagacacataactgtcagattcaccaaggttgaaatgaaagaaaaaatgttaagggcagccagagagaaaggtcgggttacccacaaagggaagcccattagactaacagtaaatctatctgcagaaaccctacaagccagaagagagtgggggctaatattcaacattcttaaagaaaagaattttcaacccagaatttcatatctgaccaaactaagcttcataagtgaaggagaaataaaatcctctacagagaagcaaatgctgagggattttgtcaccaccaggactgccttacaggagctcctgaaggaaacactaaatatggaaaggaaaaaccagtactacccacggcaaaaacaaaccaaaatgtaaataccattgacacaatgaagaaattgcctcaactaatgggcaaaataaccagctaacatcatatgacatgctcaaattcacacataacaatattaaccttaaatgtaaatggggtgaatgccccaattaaaagacatagattgcaaattggataaaaagtcaagaaccattggtgtgctgtattcaggaggcccatctcacgtgcaaagacacacataggctcaaaataaagggatggagaaagatttaccaagcaaatggaaagcaaagaaaagcaggggttgcaatcctagtctctgataaaacagactttaagccagcaaggatcaaaaaaggcaaaaaaaggcattacataatggtaaagggatcaattcaacaggaagagctaactatcccaaatatatatgcacccaatacaggagcacccagattcataaaacaagttcttagataactaagaagagatttagactcccacacagtaatggtggaagactttaacatcccactgtcagtattagacagatcaaagagacagaaaattaacaaggatatttaggacttgaattcagctctggaccaagcagacctaatagacatctacagaactctccaccccaaatcaacagaatatacattcttctcagcaccacatagcacttattctaaaattgaccacataattagaagtaaaacactcctcagcaaatacaagagaacggaaatcatatcaaacagtctctcagaccacagtgcaatcaaattagaactcaggattaagaaactcactcaaaaccgcacaactacatggaaactgaacaatctgctcctgagtgactactgggtaaataacaaaattaaggcagaaataaataagttctttgaaaccaatgagaacaaagacacaaggtaccagaatctctgggatacagataaagcagtgtttagagggaaattgtagcactaaatgcccacatgagaaagtgggaaagatctaaaattgacaccctaacatcacaattaaaagaactagagaagcaagagcaaacacattcaaaagctagtggaagacaagaaataactaagaccagagcagaactgaaggagatagagacatgaaaaacccttcaaaaaatcaatgaatccaggagctggttttttaaaaagattaacaaaatagatagaccactatccagactaataaagaagaaaagagagaagaatcaaacaaacacaataaaaaatgataaaggggatatcgccactgatcccacagaaatacaaactaccatcagagaatactataaacacctctatgcaaatacagtagaaaatctggaagaaatagataaattcctggacacatacaccctcccaagactaaatcatgaagaagtcaaatccctgaatagaccaataacaagttctgaaattgaggcagtaattaatagcctaccaaccaaaaaaaaaaatagaccaataacaagttctgaaattgagacaggcagtaatagcctaccaaccaacaaaagcccagcaccagatggattcacagccaaattctaccaaaggtacaaagacgagctggtaccattccttctgaaactattacaaacactagaaaaagagggacacctctctaactcattttatgaggccagcatcatcctgatacaaaaacctcgcagagacacaacaagaaaataatatttcaggccaatatccctgataaacattgatgcaaaaatcctcaataaaatactggcaaactgaatccagcagcacataaaaagagcttatccaccatgatcaagtcagattcacccctgggatgcaaggctgtttcaacatatgcaaatcaataaacgtaatccatcacataaacagaaccagtgagaaaaaacacatgattatctcaatagatgcggaaaaggcctttgataaaattcaacacaacttcatgctaaaaacactccataaactaggtactgatggaacatatctcaaaataataagagctgtttatgacaaactcacagccagtatcataatgaatgggcaaaagctggaaacactccctttgaaaaccgtcagaagacaaggatgccctctgtcaccactcctattcaacatagtattggaaattctggtcagggaaatcagcaagagaaagaaaaaaggggtatttatataagaagagaggaagtcaaattgtctctgtttgcagatgacatgaattgtatatttagaaaatcccattgtctaatccccaaaactccttgataaacaacttcagcaaagtctcaggatacaaaatccatgtgcaaaaatcacaagcacatctatacaccaataatagacaaacagagccaaatcataagtgaattccccttcacaattgctacaaagagaataaaatacctaggaatacaacttacaagggatgtgaatgacctcttcaaggagaactacaatccactgctcaaagaaataagagatgacacaaacaaatggaagaacattccatgctcatggatagagagaatcaatatcgtgaaaatggccatactgcccaaagtagtgtatagcttcaatgctattcccatcaagctaccattgactttcttcacagaattagaaaaaactactttaaatttcatatggaaacaaaaaagatcccacatagccaagacaatcctaagcaaaatgaacaaagctggagacatcatgctgcctgacttcaaactatactacaagcctacagtaaccaaaagagcatggtactggtaccaaaacagatacgtagacgaatggaacagagcagaggcctcagaaataacactacacatctacaaccatctgatctttgacatatgcaggaaactgaaactggaccgcttctttacactttatacaaaaattaactcaagacggattaaagacttgaacataagaactaaaatcacaaaacccttagaagaaaacctagacaatatcattcaggacacaggcatgggcaaagacttcatgactaaaacaccaaaagtaatggcaacaaaagccaaaattgacaaataggatctaattaaactaaaagcttctgcacagcaaaagaaactatcagcaaaattaacaggcaacctacagaatgggagaaaatttttacaatctatccatctgacaaagggctaatatccagaatccacaaagaacttaaataaatttacaagaaaaaactaaacaacttcatcaaaaagtaggcaaaggatatgaacagacacttctcaaaagaagacaacatttatgcggccaaaaaacatatgaacagacacagagccaaaccatcactggtcattagagacacgcaaatcaaaaccacagtaagatgctatctcatggcagttagaatggtgatcattaaaaagtcaggaaacaacagatgctgaagaggattggagaaataggaatgttttacactgttggtgggaatgtaaattagttcagctattgtggaagacactgtggtgattcctcacagatctagaaccagaaataccatttgacccagcaatcccattattgggtatatacccaaaggattataaatcattttgctataaagacacatgcatacgtatgtttattgcagcattattcaccatagcaatgacttggaaccaacccaaatgcccatcaatgatacactggataaagaaaatgtggcacatatacaccatggaatactatacaaccataaaaaagaatgagttcatgccctttgcagggacatgaaatgaaaccattattctcagcaaaccaacacaggaacagaaaaccaaacacgcttgttttcactcataaatgggagttgaacaatgagaacatatgggcacagagaggggaacatcacacactggagcctgtcaggggtggagggctaggggagggatagcattaggagaaatacctaatgtagatgacgggtagatgggtgcagcaaactaccatgacacatttatacctaagtaacaaaccttcacgttctgcacatgtatcccagaacttaaaggataattttttaaaaataaagaaaaagaaagagctttaattggactcacagtttcacgtggctggggagaatcatggcagaagtcaaggagaagcaagtcacatcttatgtggatggcagcaggcaaaaagagaatgagagccaagagaaacaggtttcctgttatcaaaccatcagatatcatgagacttattcactaccacaagaacagtatgaaagaaaccgcccccgtgactcaattatctctcactgggtccctcccacaacacatgggaattatgggagtatgattcaagatgagaattgggtagggacacagagtcaaaccatattattccaccactggctcctgccaaatctcatgtcctcacatttcaaaactaatcatttcttcccaacagtcccccaaagtcttaactcgttcagtattaactcaagagtccacattccaaagtctcaactgagacaaggcaagtctcttccacctatgagtctgtaaaatcaaaagcagattagctacttcctagatacagtggaggtacaggcattgggtaaacacagccattccaaatgggagaaattggccaaaacaaaggggctacagggcccatgcaagtccaaaatccaggggggcagtcgagtcttaaagctccaaaatgatctcctttgactgcatgtctcacatccaggtaatgctgatgcaaaatacgggtatccatggtcttgggcagccctgcccctgtggcagttccacatggctggagaggcctcagaatcatggcagaagtcaaggagaagcaagtcacatcttatgtggatggcagcaggcaaaaagagaatgagagccaagtgaaacgggtttccccttatcaaaccatcagatctcatgagacttattcactaccatgagaacagtatgggagaaactgccccccaccaggtgcctcccacaacacgtaggaattatgggagtacaattcaggatgagatttgggtggggacacagagccaaaccatatcaccatcaaaataccaccgtcatttttcacagaactagaaaaaacaatctgaaaattcatatggaaccaaaaaagagcccatgtaaccaaagtaagactaagcaaaaagaagaaatctggtggcatcacatcatctgatttcaaactatactataaggccatagtcactaaaacagcattgtactggtataaaagtagacacatagaccaacggaacagaatagagaacccagaaataaacccaaatacttacagccaactgatctttgacaaagcaaacaaaaacaagaagtggagaaaggacaccctattcaacaaatggtgctgggataattggcaagccacatgtaggagaatgaaatgattctcctctctcaccttatacaaaaattaactcaagatggatcaaggacttaaatttaagacctgaaactataaaaattctcaaagataacatcggaaaagcccttctagacatgggcttaggcaaagattttatgaccaagaacccaaaagcaaaggcaacaaaaacaaagataaataggtgggacttaattaaactaaacggcctttgcacagccaaaggaatagttagcagagtaaaaagacaaccccacagagtgagagaaaatcttcacaatctgtacctctgacaaaggattaatatccagaatctacaaggatctcaaacaaattagaaagaaaaaacaaactatcccatcaaaaagtgggctaagaacatgaatagacaattctcaaaagaagatatacaaatggccaatgtgaaaaaatgttcaacattactaatgaccaggcaaatacaagtcaaaaccataatgcaatgccaccttactcccacaagaatggccataatcaaaaaattaaaaaataatagaagttggtgtggatgcagtgaaaagggaacacttcaacactgctggtgggaatgtaaactagtacaaccactatggaaaagagtgtggagattccttaaagaactaaaagtagaaatactatttgatccagcaataccactactgggtgtctgcccagatgaagagaaatcattatgcaaaaaagatacttgcacccacatatttatagcagcaatttccaattgaaaaaatatggaaccagctcaaatgcccatcaatcaatgagtggattaagaaagtatgagatatatctcatattttctttatatatatatatgaatactactcagccataaaagggaatacattcataaattaatggcatttgcagcaacctgaatggaattggtgactattattctaagtgaagtagctcaggaatggaaaaccaacaatcatatgttctcactcataagtaggagttaagctaaggggatgcaaaggcataagaatgatacaatggactttggggacttggaggaaagggtgggaaggggttgaggaatgaaaggctacaaactgggttcagtgtatactgtctgggcgacaggtgcaacaaaatctcacaaatcaccattaaagaacttatccatgtaaccaaataccacctgttcccccaaaaacttatggaaataaaacaagttaaaaaagaaaagaaaaagatgggggaaaaacaagacaaagacaatcaaaataccttaccaacctaaattccagataagaaaattttcaggagtattcttccaaacaagcctcctattctccattcaattgggcaggaatttccccacgccaggactctttctaccacctaggaagagccaaccaagatctgtcaagggggcacaatgcctccacaggggccaccagatcagaaaaagaaaaagggtgttgtttgcctttagaatacttatcaaaagacatcgtccagtcccagaaaatgtttccccactgcaagcaagtccaagtaccatggactgaccatccacccaccagcaaggattgtgccagaggtggccctcagtttaagaaagctcacctccagggccagtgcaccagtgaagggctgccaaaccatggccacgcacctacaggggcaatctcaaatgatgctccaaatctgttacaatccagtgggtttttcttgcccgctgcacagaaaatgccaacacactgagacagaaggtattgcaacagagaatgagcttaataattgcaggaggctcaagcaatgaagacaggagatatttctcaaatctgcctacctgagaatttgaagactagaaattttaagaattgtttggtgggcaggtggctaggaaatggacactactgactggttgggtcagggatgaaaacacagtggtgtgaaaactgtcttgtgtgctgattcagttcctgggtgagggtcacaggaccagttgattcagtttcttggtatgggtcattggtccaaatagtgtcagttgctccaccagaacgaaaagtctgaaaaatatctcaaacaccagtcttttttttttaaatatactttttattatactttaagttctagggtacatgtgcacaacgtgcaggtttgttacatatgtatacatgtgccatgttggtgtgctgcacccattaactcgtcatttacattagatatgtctcctaatactatccctcccccctccccccaccccacaacaagccccggtgtgtgatgctctccttcatgtgtccaggtgttctcgttgttcaattccaacccatgagtgagaacatgcggctcaaacaccagtcttaagtttcacaatagtgatgttatctataggagcaaatggagaaattacaaatattgtgactatcagctgactgactcctgagcaataaacaattattttaaaaagcaagcaaggtagggaatgatgactgcttactgtttaactatgcctacatcttagcagaattcaggccactctgataattctaaccttgtgacattcatccatttttcaaaggtagtttctgttcctgaataaggaagggtaggttaaactataaactaaattcctcccacagttaggctgtcctacatacagaaataagcaaaggcagttagcttgtgaatataaaggcaagatggagtcagttatgcttttttctctcacttttataatatcacgagcatagttttgtgttcagttctctgtcagtggtagtggtcatgacatgggctctggagttaggtacacatagtttctattcccagatccaccaccaatcttggaaagttacttcacctttctgaagatttgtatccttctctgaaataacaagatattgtggttgagaggaataaataaaataacatctgcaaacccactcttattcctgagatcctctttaaaactagcatctacagtggtaacttacagtgattccctcggtttatgtctctctttgtctctgttttcctaaggctgaatgcttccaagtactcacctgaatcctgcctctttagtgaaatcttttccaaccattcctgaaccagctgatcctatccttctataaattatttctcccatatgtcaacatttaattatgtgccattcctcttggtgagacactatagagaggtttaaaggacattggctgtgtgatcattgagggataattgagtaaatttttttttagtgctcactgagtgttagagctgccctctctttttttcagctgttgctagcagcagtcccttctgcaccagcagcatcagaccctggcaggcatgtgaataccttagggattgctcttgtcagggtccttcctgcttctggattttggttccatttgtgtttccttttgcatgttattcaatggcctcttgtgttattgtgaaatacagattgaccgtggcagaatttaactggaggacacccagccagtgtccactgcagtactgattgctcacttggtggtggggaggaacacccacacccatatttggtcaaagaattcttctgtgttgatgatgtggtgtgaaatcagataaaatgggttttagagtttttctaaatattcctccaagggagagattgttgacatttatttatgaaaacctcaagataataactctaaggaagttgagcacagtatcctcttgcttaaaaagcctggtgataggaattgtgttcactttcctaattcatgaaatttaaaatagggtctttcctctcttacttcagaagagatgaaggacaaaagaccagatggggaggacaaggttgtttatggggaagtcatgtacctctgacctggattctacgatgttcattcaatcatacctggaagtgtgcatctttgcatgtgcagtcatatatttctatcacatgactcataattccctccctgtcagtggcaattaggagctcatgtaaagcttaggacagtaaaattatatggtgtgttcttccactgcaacaaggtttctctgaggtttaaggaaacaataggacaagagggctggacactttacctggtgtcctgccttctttttttattgagcagcagtctactcacccatcatttttgaccttcctgttttcctaccatgggttcagatataattactgatgtccagatacaattacttgtgcctggagcttgatgttattttttaaaagagaggcctgaggaatggtttcctagctgatttccaggattctaattttcactgtctaagtcgttggttttcaaccctggctactggttagagtcaccttaggaatttaaaacatacaaatgcctgtgtcttcctcaaagagagtctaatttgattgctccatggtgtgccttgggatttggtcatttaaaaatgcttccaaggaaaatagtcattttacagtggaggaactttagcccagtgctcaaagttaacatccccaataatcaaagatatagaaattctgggcatcctaatatgatggatggagaaggtgcagcatcgcctctgtggcatttttgcccaaagtggataacctgagtttaattatgagaaaatattaggtaagcccaaactgagggtcattccaccaaataactcaccgatactctttaaaaatgttaaggtcatgaaggcaaaagtaattctgaggaaccatcccagattgaaggcgattgagaggacagaataatgagatgcagtgtgtgatcttgtatggatccttgtccagaaaaaggatattagtgggaagatggagaggatttgaatagggtctgcaagttcattcattgtaagatgtcagtgatcatttactgatgttgatgattacactgtggttatctataacgttaatattagggaaagttgaacgaaaagaatatggggactctgactatttttggaacatttttggaagtgtaagattatttcaaaatgaaagttataaaaaagaagggggaaaaaacttccagataatcctgagttcccagagttgaagaccacttgcctaagttatcttgcctaatactgtcagagtaatcttcctggaaatgctttttgtgatgttactgaccttctcaaagctttccagtgactcttatcatctataggatgaaattccaatttcttaagccatcattcaaagtctccataatatgaccccaatctactcccttgatccacatttgactttctcatgtctaaatattttgcaattatttgactccttcatataacatgcatacctgcctgttcacctcctaaattgttcttcatcctaaggcttatttcagtccctgtctcttcattgaagcttgtatggttatttctgttagaagccgtcatcctttgtttctttgaattctggaaggtacaatggtgtggactgaaacataagctttggattcagaaatatgtgagtctgaattctggttccacctttcaccaattctgagataaaagacaagttagtgatgtcttgggatagagggataatagtacctacttaaagggtcattgtgagcattagatgaggtgcaaacacaaaggtctccagcacataacagatttcttcctcatcatttttgctgctcaatggtccccaaaggtattatgggtgatgcaaaggcttttatcaaaattttctgcagcaccttttaaaaagtcttgtgcctggccatcactaagatgagagacacccttgaactgaactgaatgtatgggactttaaaaaactcaaccgagatttgtttttcctggaacacaactcagtaaacaagtggatagaaaaatgtaacccaacagagggagaagggaagcgcaatggtttcatataacagccatgccttcttaggaaaaagctgtgatgccttctgagagtttgctctcagtcaggcaggatcaaagaagtacaactccttagtacaatcccttaaaccgtgagtcctgcacagcacctcactaatccattccctgcccaggtgatgtgtgcataggtgaagagtcagatctccataagtcagacactcttcccccttttcagctccctgaccctcactactgtgtgctctggtctggccccagctgccaggccattagtattggtctaagaaagcaagaccaggacgggcagctgagaggaaagtcagaggccaccaagcatgaaaagagagagatgaggctgtcattgctcaaagtcacccactctgggtgtgttttatgactgtttctggattttggaatattctcccctttgtgatcattccagggactcaccctcctcctatttccttctcattgcactttctgtccccagtgcaccctttttatggccagagactggctgtatgactagatgacaattcagtgaaagttacttgttgtgaggactgagagccaggcccaccctgctttttcccagaagagactggaggttcataaaagccagctttaatgcagggctgtgcaggtgtgagtgtggtgttagggaacaggtgcaaaagtgaagagtgagacagaaaaaaaagatgctggctgttcatcaaatcctgaaagtagagggagcaaaaattattctggaaggtggatgtcattcaggagaccttggaagacctagagtgtcctctgcacaaataaagtggaggatggggttaaattacggagttggatgacactcattacctgacttcacttctctgcctcagttttttaaatctgtaaaaatggggatgctgacactcaggattttttatgaggactgtagctacctgaaaaccccttaggatagtgcctggtgagtagtgagtgctgcgtcagtgtgagctattatagttatggaaataggcaaaggtgccatcaggagcattcagagtgaggaggtgccttccagtcagggtcctcgcaggcagctggagatgaagatggttaagggggcttaaactccacagtggaaggattgaggagcagtcctgagaaggaattcagaagccaacaggcatggaaagaggccagggggactgtcattgctcaaaggccacacactgtgggtgtgctttatgactgttactggctttgaaatcttctcccctttgtgaccattccagggactcgccctcttcatatgtttctggatttggaatcttgagcaatattcatgacgtacaacattctgtgaaaaatacctttacccgacagcaggaacagccagagtgggtgtggcttctgtcacaaatattgtctcctaggagtctaggaatgtgtcctaagatcgaatggttttgctgaaagccaagcctagaaatgggcttcaggggcaccttgtgaatagcatttatgttgccaatggaaagcattcatctttttaaaggaaagcattcatcttaatgaagaaatcccatcttatggtctgggtcagtattttttgcctctgtactatccttatttataaattgaaaagagaaagaccgaagaagagtgacataaggaagcacatgtatgaattaacaggacagaaatgggactagtatgtgtaaattaagggaaagcatgtatatattttatgtgaacataaaaaggacttcttgttggccggcgtggtggctcacgcctgtaatcccaacactttgggaggcagagacaggcggatcacgaggtcaggaaatcaagaccatcctggctaacacggtgaaaccccgtctctactaaaaatacaaaaaattagccgggcgtggtggtgggcgcctgtagtcccagctactcaggaggctgaggcaggagaatggcgtgaacccgggaggcggagcttgcagtgagcggaaatcgtgccactgcactccagcctgggcgacagagcgagactccgtctcaaaaagaaaaaaaaaaaagaaaaagacttcctgttttaaacagacttctgtgtaaaaataaaaataatatacactgccttgagtggagagcagactgcaggaccaaaacattccagcagagtcatgagagaatgggttgtgtggcttctttgctaaatagtaggttaaactgagtatgttactgaagagaaaggagatgaaggagaagataggtgagggtgagagaatgtgagatggcaaaaggaaaagactgaaagaaaggtttactaagggctcatcaggtaccaggctttatgtctaatgccttccacatattaacgtacccattcaaactgtcattttctgatgcagtaagagtgactcttgtgctgcagatgagaagaggctgaagtgggtgaagtgagtggtccagagtcatccagccagttcatagcagagctagtgtgtttcacctcgaagtttgtgctctttgtgattcagacagaaaagtgagacacagaaggaaggcaaagcaatttttgttgtgggtaaagtttacagaagttacctgtattaggcagaataatggcctcctaaaaatgtccacatcctaatccctggaacctgtgcatgctactttatttggcaaaagaaaagactttgcaggtgagatgaagttaagtttcttgagatgcgaggttattctggataatttgggtgggctcagtgtagtcagaagggtccttgtaagtgaaagagagaggcggaagggtcagggtgagaatgatgcagccagagagactccactggccatcgctggctgtaaacatgcatcaaaagacaaaattataacaaattcagttatagatacaattggcttttatttgtgattcatgagtcagggcagtttccattctgcaaaatatagtgatagctcctactgggcaatacaacagtagaacagtgggttttgtaaaatgggaatccaggaacagaagaatataaataaattgatttaaataaactgattggttaatttcagaatacttcatattacttttttctaagagttaaagcagaaaggactttcttactgtgctgactcagacagcctggactctcatgtttttaggaaaattttgtctgttctgggatctacctgcttcctcatgtttcagtgtgagtatatggcatttagcatgactggctccattctggagtcaccaggctgtcacctaaatgagagtttgactaaacataaggcattaacactactgtcagttaccatcattttggacttccatcattcataggttatgatgtcctcctaatcatacatttatttgagtttttgtcattccagccaaagagagaatatttgacatttgacgaatggctgcatgcaaacatttaaaggttttagagaatacagcacaccagggtaactaatattgtgacaatcaggaggatcacaccaagagtttgaagtatgatccataggcagagaccccatgaaccaaaccaaataaaagagaatagattaaagaatgagccacatgagaagcctacccattttaatcaagcagcatatttgttaatttttgcaactgagtctctatagtacccactgtatttatttatgtgcaacaagaagtgtcagcaactgcacaaactcctccctgttcagctagtaggcagcaattctgttatctggcatcccatagctgggttaaattaaaacagggcgtgagaacaggtgagtctagaggtctaactctaacagggaccaccgtgcatttgaataaacagttgtattagggatgttgttaaagttagccactgggcagaataaaggatcccttaggtcaaatatttgggtttgacatgatgacatgacacatccaacactctgtcaaattacctgcacaaggcgctgattgtgaaattctagttacagcattatcttaccaaattaaagaggcaggcatgagcagggaaaaatggagtgggataagagcctcgtcacgatgaggcttgggacatcttgggaaaaactgtccacagcatgaagtcatcaacttcttgtcctggttggcaatttgagtgtctctagttatggtgttgaacattttggttagctctgagtggcccacatctcaggcatgagggtttttccttgaaatttacattgagttgtccacctccagcttataggtcttcaggaagagagcaggtcttatacttagtgatgccacaggagaaaatgggattgaaggagctagaagaatccagtccagtctgcaggtggataataaaaacttgaaaacaaaatacagggctacaatttgataacagttgtattatagtctttcctctgaacataatttttctctatctctccctgtttctaccaaagttaatcagagtaagactaatctgtttacaaaataggtagagtctcatcaaacttggtctgattctttatataagaagtatagcaagaatagcgattgaccacatagcatctttttaagattgctttgctggaaggtttgataaggaatctcagattaaacttttagaaacctctcagcactaggaagccaaaccaaggctgacttcagactttgcctgcagtacctcagtacctacgggttcattctatgtatatttccaaatatgacatcccagccaaagccttggtaatataaccagtatttttaaatgtatcctgttataaacagaacagattcttattgaacttatgcaaataactattttcataacaatgtgaacacccatgaatagttgcctgattctggatggaaaatgtagggagaaaaattaatgtttcaatttttgttcacaagttgtattttaccaagtttctgtaagctatagatagcttaaaagaaaaatattccttcaaatttggaaaacaaaacatttaaagaatcatcaaaacttcaactaaaaattcataaaaacattatcctcattagttcatctagtcccatgaaattaattttttgttctgcctgatcttgattggcagtttcatgaagatatctcttcattaaagttttggaaattcttagcccaatggtatgattctaaagttatcagaaacttgtattcaagacaacttgtcagagtcttagccataaatctccttggaaaacaagcagttttggactgtaaccatttccaagtgcttttagagaagaatcaaaacaactgtctgtgaatgacaaagacttaagatggcaatggttaaaaatctgataagacttcagatttgatagatttgatgataatgacaccactcacaaacaaatttggttatttctgtggcatgtaacactatgactgacaaaatattagatttctagaaatctcatataatttttgaaacattcacatcaataacatacccgcaaatataacttagagaaggtttggcatcacttgtcatttgacagtgttttccatataatttaacatatcaattaaggtgaatttccatctcgcttctgtttctcaactggattactgagttcagggcatagtacattaacaaatatggccaacaatgtataagcttatgtatgttgaaaaagttccccaggtaattttgatacatacccctagctacaaaccattgatttaagcccaagtcctgcttatcagagcaggggttctgcatcctgcttgcacattagtagcatgtgggaaggcttaaataataacgccttggtcccactctagaccattaaatcaaaatgtatgagcagagcctggaaatcagttgttcttttaaaaattttccagtgattccagtgtgtagccatatttcccattagatttctctttcttcttgtggaatttatctttttctattttggtattacaattatttttcatgtcttattttttggagacagggtcttgctctgtggcccaagttggagtgcagaggcacaatcatagctcactccaaccttgaactcttgggctcagaggatcctcccacctcagcttcccaaagcactgggatgacagttgtgagccaatgcacctggccctttgtcttatcgtctgtcttaggctttatgttccctggagtagggaccttgccttcttcatttctgtatctttcatgaacacatgaattggttatcaggaaaagattctcagccacgtttaggttgtgtcctgagtctcaggttcacatactaatgctaccgtctttgtcctccacaaggacagaggttgcttgtgatgaagggtgtgggtaactccacaatgcaggtggtggaggaaggttaccttgtttttagatataacattggaactaagaattctatgtgtacatggggtggaagggcaggatgtataggaagacagatctaattaggatggagaaattatactcaggagtagtggtaaaggaagtaaaaaggattcatgaagagaagaaatgtgaacttatctaatgggctagagtaggccgctgcaggttcttcagtaggtgattttaggaaggtaatgaagtagtcatatgctaggaagcattcagactagagaaaagaagtcaagcaggacttcaagcagttgttgaggtttatgggaatggagagaacagcacaagtgaaagatgttttaaaaaggaccaagaagctttcacaatgtattgaattggggaaacaaatgagcagaggctgggagtagtcatgtctaagagacagtggagtacaggaagcatgaagaccagggaagaagagacctgcaggaattagtgcttagaagcaggagtttagtgggaggaggaggagatctagtcccagatacaggtgaagaagtcctttccctctcccaagcatggcagtcagccctgcaggaaataggataagaggaaaggtcataatacctaccactcttcccgaaatgcagaaactacaccaaggctgctatatcagagccatcccagccagtactccaatcatgatgctgacagcggtcccagctgagaggtcaggtgaacttgcttgtactgactcatctgccatggaaagaaaagagaaggaatgaagttgatcttattttacagggaagtcccccaggaaccaactctcagcatgaagtcgtttctatttgttccttcaaggaatacattatttttgtgggaaggttgctgggagatgattatccaactaaattcttgcaggttttttatctcaccaggtttccaggttgatggtcagtcttctgtcaattccatcctgacctttttacactcagatatttttgaaggctttgaaatttgagaaagactgattgctaatcttgtatgtcattaaaacttcccactttttcatggttgcattttttttcttagtgtctcagttgtggcagttagtgcattttgaattcaccacctcctttgcacagagacctcacttcccatgggctcccagcaggtgtgtgaaagcaagtcaagttctgcaagactattttgctctgaaaggtgatgggcttgaggaattcccaacagtcttgcagaaactctcttcgaactgcactgcaatctaaaactttcttttttttctctttctcctccacaggcatcacatctgcatcatgatctgagggctctcccaggctcctccccctcccagcccactttccctcacaggtgtttttccctcaaaattatattgcatgtctaatcccatcttgactgcatctctctgaatgaaaactaacatactaggcttgagacttcatatttaactctgttcttttccctctcccatattaatcagtaaccatgtcccagtggactttttgtgtaatgcctgtttctcccatgtatatgtatatgtatatgtatatgtatatgtatatgtatatgtatatgtatatgtgtgtatatatgtgaatatatatatgcacatgtatatataataccttctgcatctgtttcttctttatttctgttgcaataatttgggcttaatttctcatcagtcatcagtcaactcagactgatgattaataatcactaatattagctactgttgaggggtgcttcctatgtgtcaggccctgtgttaaattatttacatgtatctcatttgagctgtaaaataatactgtcaggtagaaaatagaggtggcttagagtggtgaaaaaacttacccaatgtcatacagctagtgacaggcggatctaggatttgcctctaagactacctgacttcaaggctaataataatggtagctttaacagcagctaacatttatgaaacagttcctctgcatgtggcattttgctgaatgtttcattgattattacattaaatcttcaaaacaatactgtgaaacaggcactcttattgcaattttcagttgtggaaactaaggctcagagaagttaagaatcttgtgcaagaaatgtataactataaatacatacatttaaaaagaagaaagatctgaaatcaacaacctggctttacaacttaaggatataggagaaaaacaaatgaaacccaaagttagccaatgaaggaaataataaagattagagtggactagaaaaacaatagagaaaagcaatgaaaccaaaaggtggttcttcaaaaaagttcaacaaaattcaaaacctttaattagatcgactaagaaaaaaaatgagaagatagaaattactcaaatcagaaatgaaagtgattactaccaattttacagaaatagtaagtgttatgagtattatgaataattatatgccaacaagttagagaacctggatgaaataaattcccagaaacataaaaccttccaaatggaaccatgaagaaacagaaaatctgaatagactaataactactagggagactgaaccaataaaacatttgtcaaaattcaacattctatcatagtaaacacactcagattataaatagaaggaaactacctcaaatataataaaggcattatctgaaaagcccaacgctaacatcatactccagggagaaagactgaaagctttccctctaagataaaaacaagacaagaatgcctagttttaccacttctattctatgtagtattgaaagttctagtaagagaaagtaggcaagaagaaagaaaataacatccaaatcagaaagaagtaaaattaactttgcagatgacaggaacttacatgtagaaaaccctagagattaaaacaaaattttagaactaataaacagattcagtataactgcaagatactaaatcaacatgcaaaaatcagttgaaatcagctgtatttcttttttcttttttctctgtctctttctctctctctctcttttttttttttttttttgagacagagtctcattttattgcccaagctgaagtgcagtagcatgatctcggctcactgcaacctctgcctccccagttcaaatgattctcctgcctcagcctcccaagtagttgaaattacaggcgtgtgccaccacacctggctaatttttttttttttttttttttttttttttttagtagagacagggtttcaccatattggtcaggctggtctcgaacttgtgaccccaaatgatctgaccacctcagcctcccaaagtgctgggattacatgtgtaagccgttgcatccagccaaaaaacagttgtattcctatgcacttacaatgaacaatctgaaaagaaattaagaaaaaaattgattcacattatcatcaaaaagaataaagttcttaggaatatacttaaccaaggaggtgaaaaaattgtaagctgaaaattataaaatgcagctgaaagaaattaaagaatatattaataaatggaaagaaattccattttcatagattggaagacctaatatcattaagatgataatattaatgcaatccctaccagaatcccagtggcatattttgcagaaatagaaaaatcctaaaattcatatagagtctcaggactctaaatagccaaacaatatgaaagaatgaagatggaggactcacacttcctgatttcagaatttactacaaagccacagtaatcaacacagtgtggtactggcataaaggaatacatagaaaccaatggaatagaatggagagcccagaaacaaatgcttgcgtttatagtcaaattatttttgacaagggtaccaagaccattcaatagggaaaggatggtcttttcaacaaatgatattgggacagctggatatccatgaagaaggatgagttgaatctttacttaacaccatataaaaattaacaccatataaaaattaacccaaaatggatcaaagacctaaatctaagagataaacctataaaactcttagaagaaaacatagggggagagcttcatgacattggatttcacaatgatttcttggctatgacacccaaagcacaggcaacaaaaaaaaaacagacaaatttgacttcataaaaaataagatcttctctacatcaaaggacattatccagaaagtgaaaaggcaacccatggaatgggagaaaatatttgcaaatcatatatctgataagggattaattctcagaatatataaagaactaatataactcaacagcaaaaacccagaaacccaatttaaaaatgggcaaaggactaaaacagagatttctccaaggaagatatgcaaatggccaataagcacatgcaaagatgctaaacatcactaatacttagagatatgcaaatcagaaccacagtgatacaccaccacacacatgttaggatggctttgatttaaagaaaaaaaagaaaacacaaaacatgtattttgaggaggtgggaaaattgaaactctcgtgcattgccggtgggagtgtgaaatggtgcagccacagtggaaaatggtagagccgtttctcaaaaaaattaagcaaagcattaccatttgatgcagcaattccacttctggtcatatgcccaaaataatggagagtagggctttgaaaagatatttatacacccatgttgatagtagcattactcacaatagccaaaatgtggaaacagctcaaaagtccaccgaacgataagtcaagaggcaaaatgaaatatatccacacaatggaaactcattcagtcttaacaggtaataaaataaaataaaatgccgagcatttacacactcatgagactcaaattctgatacatactacaacgtgaatgaaccttaaagacgttatgctaagtgaaatgtggccagacacaaaaggacaaattttgtatgagtctattgatgtgaggtacttattaataaaatagtcaattacagacagacagaaagtagaatgatggctaccagggactagggttagaaggagtggagagttactgtttattgagtgcagaggtttagcatggtgagttgaaaaagttctggaaatggatagcggtgatggttgcacaacagtataaatataattgatatcactaaaccatactttttttggagacagggtctcactctgtcaccgaggctggaattcaatggcgcaatcaaggctcactggagcctcgacattctgggctgaagtggtcctcccgcctcagcccaccaagtagttggaactacaggccatgtgccaccatgtttcgctaattttttgggaagacagtgtttcaccatgttgtgcaggctggtattgaactcctgagctcaagcgagccacccatctcaacctctcgaagtgctggaattacaggaatcagccaccgcgcccagccctaaaccgtatatgtaaaatggctaatatggtaaatttcaggttatgagtgcttaacctttatgaatatatagtggctggtactcttatcctcgctataaatacacactttgtggccctgccccttccctcccttgcagagtcccggtggctgaatctccctatttgtccaaatgttcatccctagctgtgctctgtgctgtgtccacagcgtcatacagcgggtgacttcagagccaggccacagttcaagagtctgccccagggctccctctcttcccagttccctgaagcctgacccaggagaggctctgccattgattgacagctcaatttagccagattcaggacaggtcgcccaagcaccttctccacacacccaggtcccaccccaggtggagtcagggcagggccagtcaccaggtgagccggaagcagagcagggagcagactctgagctgctcctccctcgtccaaggggtttcctcctctcatctggggaaaaagtgtgagatgtttcaaagcttccttcttccttgtagctcatgaattaggcaaaagaacacaaagaggtgacaaaaagggacgtattgatgaccgagagaacccttaaggacccttcctgcttttccctctgtgaagctctttccactacctggggctttggggctgagggagccccctccccacattccaggctggatccataatcagccatgagaaattactgaagtacagggaggagggtctgcagagacagagtgagagggttcagcggggagaatttgggatctgcttgtgcccatgggacacaggctggaaaagaaaagttttttcagctcttccttaacaccagagagaccccatctcaaaatatgatgccaacggtccagggatccatgtaccacggactgtgatcatcttgactgtggtactattgcggtcagtggccaatttgtgggcatagcaggtataggatacactattctttgcagtgctttggggataaagagctcttgcatgtgttgcagaaggtttccattactcagccaaaaatacggagagggtgggttagaggccacatggatgaagagtctaaggtttgctcctaactcgtaagatataactggggtagaaggggtgtccaagccacccggagcaaagagaataaagccgtaagtgatgtcctcagagggaagcggaagctcctggtctgtggaagggctgcactgtccctcttacccaaatcacaatcctgaagtcccaaccaaaccccgatgtgttcactgagcctgagacattcacctgtttctcccatcacaggctgtggaccctgagcctcccaggacaggagcagcccctcctctcatattcttggtcaaggctgggtctgcccaggtttgcttgtggcagaaagtcatggccagcctgggtgcctagaggtgagggtctgtgtacttggacctgagagggactaagaggcctggtctctggctgcatggatttgggctgtcagcctgggccacagaggaacagaagatactcacagcggacattcagggtgactgggtcactgcggctggcacccactgggttctgtatttcacattcatagggtcctatgtcattctttgtggcgctgagtagaacgagggtcctgttgtcagtggagagcagcagcctgggactgaccaggaggctctgattgtttacccaccacaggtaggttgtgttctgagtctcaggttgacaggttaaaaccacaatatctttgttctccaccggattgaagttgttgctggtgatggagggcttgggtggctccgctgtgcagataagagagagaaaagattgccctgtgtggccccttggttcccccacggacatctttcaatcagagttggcatctcccacctctaagcccactcaagtccttaaaagcccacagaaggtgtgtgtatcacaagacagatgcacaatgatctgagagctcagacactgtgaggctgcctgatttgtcttagagaagcacagactttctcaagtgtaaattgtgcagcagcgttggcccatggacagacccaggaccatcaatcacagccactggtgcctctcctggtcctttcctgatggctgcctacctggccctttggggtcctcacctcgaatgggcaggagctgagttccttccagctgaacactcctacaccacccagccaaggggtgtttctctgagccttttttttccaaggatatcccagagatgggtgatgataacaatgggtgtttgagcagacatagcagaggagaccaggaaaaagtctagaggtgagtttagtactcagactgcagggcctccaggtggggcagctctacccgggtgtttgatggtgactgacaagagctagtgaccgccaggaaagtgcagcagagtccagaagaagatagagaaagggtgagtgagacaagcaggggctggctgaaaatctgaggattctcaatgacataacaagaacaatgaagacaaattaggagaagagatgtgtgttatgttaggaaatttacaaagagctccctgtccccagctcctgtgcagtcagcaaaatggaggaaatcccaacacaggcatgagaaatgctttcttccttttctctcgacctacggaaacacaacaagagtttgatcaaattcatctaaactaggcagagtctaagtgagatgccagtggctggtgcagttcccattccaagggaccccaccttatgacaatggtgtcatcatgaggacacaggtgtatgcggaatggacagcaaacccatcagacagcacctgcctaggccgctgcacctggaggaggtcccaggaatgactggaggaccttagccccacagcgagacgaggatggagttggtagtaaaatgggtggaatgaacccatgggctttggggactgcacacctgtcctgcctctggccccctggtgagtcagtgtagagagcagatagaggagttgctcatccctgtcccatggccaagcatttacacagtcatgagactcaacacctgggtggcttcttttttttttaagatccagggatcttgctatgttgcccaggctggtcttgaactcctgggctcaagacaccctcctgtctcagtctcccactggggtggctttaggggcaggggatgagagaggtggaacatgggtctcagtcccttggagggacagggaacaggtgccagagcctcctaggatcctgcatcaggttccagtctctgaagagattatggatcattcattccttcattcattccctccctccttcatgagagaactactgagcgagtgtgtttctcactttgggccctggcatgtgcagggtgtgagtggggagagaaagcaaagtcttctcctttatcctcctgtgggagtgacaccaacacatcaggaaacacaggatttcaggtccagtgagggtaggagtgtgaatctaagggagaggcctggacattcccagcactgactctgatagttgaggcaagagattcagttctaggtaaaaactaattctctatttgttcctcactccctagaccagaatctcccacttctggcttggatgcctaggaagcaagctctgtggctacaaagacctggggactctgatgtgactgtccggtccgtgagaccctgcctcagtggctgtatttccttctgcctcagtttcctttaacaaaatgagataaagcgtaaatggtctctggcttgccttgctgtctgtgaatttaccttaaaataatcacaattacctggatgagagccctgtgtagaagagctgcccaaacaagcaggatctctgattgtttgcctccaggagtgggttatttggacctgattcctggtgtacaaagaacttacagcagaaactttcttcttctttttctccccctgaggacactgactcccctaggacctctcttaagttcctcatccagggggactgaggtcctagtaatcctgttcatctgtcctctccaggctgagtctcaggtgaaggatgaggctctgtccttgcccagatgaggccctgggggtgaccaggctggtgaccagctccatgagccatgatcctcaaacagctcaaatccttgctctcagtcagttcagcccaggaggccacaacccagccctgacacaggttccttagggtcacctggagtcaagagccctgggacagggatctgggacttgtgcttccagggctgagcttctctgtgaggattccaggggactcctcaggccaggctctgacccagttctccagggtctttttcagggggagggcacagaatcttggctgagactgatctccccctgctgagtgccccccatcagactgtccttcctctgcagcaagtatctgcagggtctggatgcaggaaagggattctggtctgtagaagtttgtctcccccatgtgtgtccttcactaaatgcccaaactccaacactggataaaatgtagatggggacacaggcacaacccaggcctgacaaccccgtgtgtatgaagtagaactggcccccagcacccagaagtcatggaggtatcactcacagaatacgtagaattgtctggttacttcttcattcacaagattttcttttataacgtgtagggtatagattcctgcgtcattgtgggtgacgttctggatcagcagggttccattggggtatattgtctctcgaccgttgtgtgcgggccctggggcattttcttgacttatattttttacatatcctataattcgatagttggcatgcaccctttcccctttgtaccagttgtagccataaagattctgggactcattatggactactagaaggacctccttcccttctgcgacattgaacggcacgacatcaatattggtctgggcactgtttggcaggttccagaaggttaaaagcgaggctaggagggggagagaacatcagtcaatattgggacctatgtattggggtggaaagatggggccctggatcctgagcaggtctcttcacccacccccatcttgaagtaagtgtgtgtgtgtgtgtgtgtgtcctactggatcaatgtcagcagcatgtcccctatcagcacctctgaccttacatttccctgttcggaatcctcttccccagggatctgcagggctccctccatactgctggacctgcttacatcagggcatccttgggagaccccttccctgacaccttctctagaagccctgggtgttccgtttctgacatttccctgctctgttccctttagagctcttgtcaacacctggcttcacattctagatctctttgcctgtctgtcttctgccgcatgagagcgtgagctctgtgagggcagggacttgtgtgaactggattgcaccccagtgcctggaacaggctgcaggctccagtagatgagttcatgagagttcccagggccctccctccacatcctggggtttattttccaatgcctgaggttggtggctagggacaatgttttatgccctggttatgtttttatttgaagcgtcacatgatatagttattattatcatatttcaaaatgtagcagctagtgatgattaaccaggaaaagagaacatgtgagattttcttgaccctttccaattccagtccaatgtgattttcctgttctggtttcctgtccctgtctggtgtcctctcccaaaggacttcaacagaagccctttgtcccctctcagagccccgtcctcccaaggagaccccagccagtctctctggccctcctcccacccactcccaggaagtcctcccctcacctgtgagcaggagcccctgccagggaatgcacactctgtatggacaggctgaaggggaccccatggtctctgctgcctgcttgtcctctgtggagaagagcttgggctccaggaactctcttgtcagggctgctgtgactgtcagctctgctgtccttcctacctctgtgctgagcctcctcccagggcaggagcactttccaagatcacatggtccaggggtggggtctctgctcaggagtcctctgtcccctcccctctcattcctgcctcttttgtccctcttcctctttcccttttgtctatattcagttcccgatacaaagctttgagtagcaaggctgatggacccctgtcccctgggaggacaaccaacctttcccagtgctgacctatgctgtgttctggccttgggtctgtcacaccagggggattatttcccttgtgacagagaaacccagctgggccttgggtttctgctgggatgatgcccagcaggaaggtgacagaggtggctctgggggatagaaaggggctcactgggggatgactggggagggaccagccctctgtctccagtgacccaggcacagaaaccaaggcccaggggtctcaggaggagctacagctcctgggtgtggagggaggtgtctggtgtgtcctgggaagagagctgtggtggagggaggtgtgtggctctgagctctgctgtccttggggaaggcttcaaggaaaccctccctctccctgtcttttggatgtgctgtggctcaggtcctttccatgttctacctgacctggaagcctctgtctggctgacagtcctgtggtcaccccgccttccccatgggtggtgccaggagggaatggggagctgcacagaaacccctggcagagcggggtcttcaaaggccccaggaaggaagaggtgggacacagcaggaacgcgtgaaagacaagaagggtctgttggagcaaggaatggaaaccaggctccaccttcaccaccttagcaaggccaagttcatgtccaggggaattacagctgaccttcgaacacacagatttgaacacacaggtccacttacatgtcgatgtttttttgtttgtttgtttgtttgtttgatttttgttttttgttttttgtttgtttgttttttgcttttttttttttcctgagacagagtctcactctgttgcccatgctagagtgcagtggcacgatctcagctcactacaacctccacctcccgggttcaagtgattctcctgcctcagcctcccaagtagctgggactataggcacccgccaccacgcctggttaatttttgtatttttagtagaggcggggtttcaccatgttggccaggctggtctcagactcctgacttcaaatgatccacccacctcagcctcccaaagtgctgagattacaagcatgagctgccatgcccagccacatgcagatgttttaaattaaaagttgcactgagtgtgtcccctcctcttgcctcccctccacctcttctacctctgccatctctgagacagcaagaccaccctctcctttcctcctcctcagcctacttaacctggagacaaaaaaaggataaaagcctttatgatgatccactgtcacttaatgaatagtaaatatgttttatcttccttatgattttcatagtaacattttattttccccagcttatgttattgtaagagtacagtatataatataaataaacatgcaaaatacattgatttaccgtttatgttaacaataaggcttctggtcaagagtagggttttagtggttcaattgttgggaagccaaaagttatacaaagattttctacggggtcctcagcacccttaacccctgccttattcgagaatcaactgcaatttcctgagtgttctctgtgtgcgatgtgcacccctggaaggcaagagatctgtggtcaaagtcaggggctgttccagggatgttgacgagggtccacatggtgtgacctccaagctacaggatcaggtcaccccaggtcctgctcatggagagtcccaggctgcccaactccatgcagtgcaggatgagctcaaggagaggacaggagttgtccagagaacagcaaatcaagatttggagaactgtccaccagggggataggctgcctcagaaggagccacctgtccccaaggtttcaaaggtaggacccagagaggtgtctctgggggcttcagagagaggacaccagcctaggaggtggtccccagagagccctgtgttcctccatcacagcactgggggtgctgcctccaggtcatctgtgtccctgtctgtcgtctgctccaggcctcctggcaggacccaggagctggggcatttcccacctggatactcaggcaggggtttcctggttcctctgttatgggagggggaggccctatgacccttagcctctctgagatggaaacaaaggcagatcctgggttatcctgtcctcctgcaggggaagttcccctgggtccccaggtctccttgggctggttagaggtctccagagaccacagccaggagcccccatctccagggaccctcgggggtggggtgtcatcacccaacttccttgtgatcaggtcccctggtggtcactccatctgggatggaggatccagagtctgcagcaggtcaggtgtctttgtgagaagaggaaggacataggctgctggcccaggccccctgggagtcgtgacatgactcacaagtcagagacggggaaggggtgtcactgttctgggatgagtcagattctgacccccctctcttagaaggccctgtcctccctcttgaagctctgagggttcaggccctgtccctggggcagccttgggcacttgttggcctcctcccatgctggcaccagtgcctctgtgtccacaaagaacagaccctgactccgggggtcacacagaggtgatgtgcttctgttgtgtgaccgcccacgcatttaaccagtatttgttgagcatctgttgtatgtcagacactggactgggccctgggattccacaaaaagcaggacagacgtggcccctgtgctcatggagtttccctgtaacagggagacaggtgctcagtgaacatcatgggactgaagagctaatgctaatgagagaagggctgtgaatgtgctctgaggatcacagggagctgccctaggagatgcctttcggctgagccccagggaggaggcgatgtgggggcaggagctgcccgcagaagttgtgacttggtggacggccactggactgcaaggaggagctgacagagtgcgtctggggagcttggagggcgaggaggaggtgggtcgaggtgatcctggtgagggtataccctgggggactctagtccagctgaaggacgtcagcggacgctggggaggtgccaggccgggagggactctgctgccctctgggggacaatgaggaaagtgtagacggaaaaatcaggataggtttaactcaacgtgatcattaagcattgatcacgtttgcttgacgctttaaattctagatatctctcacgcaagctcttctctactctacccccagcgaatcatcaaaattagattgtggtcttatgtcaggtcaagttctgtgtgcacttagagggatcccacacagtattcacacttgagggccggctggagcatgtgtgggtagaagggaggattcgtgtccgtgtatcctcacaagagccagggtgtctgggtggataaggctccacttgaccccaaaagtcctcagaacaagggagcagagcctgatgaaatcagaatccaggggtggggctggggctctgtgcctcctcctcctcccttcctctctctctctggggagttcgccctcctctccctcagcagaattcttgggcctcctcatatgaagaaacgtgatgggcccttacagacccacccagagatttttagcagagacatcaggtttcagtgtcaggagcaccagtcacccctcaggcctccccagacccctcctcagagacagatataaatatatctgtatataccttcagtgtgttagtatctttatgaataagtagagtttcttgcaagcagcatatgcttggatcatgtttttttatctgtttcatatttttaatctgtttcaccaatctgtatcttttaagtggagcatttaatccatttacatttaaggttcatattgacatgtgaggttttcttcctgtcataatgataattgtcagctagttactttgtagcttgtttctttttttagtttatggacttttcttttctgtttggaactccttcgagcatttcttaaattccctcagaatttgcttctgggaaagactttatttctccattttgaagcttattcttgcaggataaaaaattcaaagttgatgtttattgttgtttttttctttaagtactttgaaaatagattctcaatcccttctggcttgtagggattctgcagagaagtctactgctagtctgatggggtttcctttataggagattaaacacttttctcttgctgattttaggattttttccttcatgttgaccttagacagcctgataactatagttgcggtgaggtccttcttgcaatgtatctgcctggttctatttaagccttttctatctgaatgcctagatgtcttgctagactagctaagttttcctcaataatttcctcaaataggttgaccaaactttacagtttttcttctccctcagaaatacctataattcctaggtttggatgttttacttagccccatgcctctcaaaggttttgttcctttgtaaatgttttttctttatttttctctgactggattaattataaagacctgtcttcaagttctgagattctttcttctgcttgatctggtctgttgttaaagctttcaactgcattttgtaattccttcaattttttttttattttcagaagttccatttgtttgtttgtttaatatctatctttctggtaaatttctcattcatatcctgaattgattttctgatttctttgcattagttttcatatttatcttggatctaatggagcttctagaaaatcaatattttgaatcctttatctggtatcttaaagattttattttcattagaatctattgctggatagttagtgtgatctttttggggtgttatcctatttttttatgcttccagaattgttacactggttccttctcatttgtagaaactgtcacttctttttatttttgaatttacttttgatggaacttttttcttgaaattgcaattatattgcatgttgagtagggtcaattggctttccttctgggtgctttcaatggcagacactctatatgaattctttggttatagatagccttagtgtggtggctttttcaaatgccagtgactgtagcagtgcgtcaggtatgtgagcaaactcatggcctcctgcagaactagagtggcagagatctcaagaaccttatctttaaaaaaattaataataataataataataataaaagaaacttatcttgttcccaagttccatgcacttgattgtcaagttttgcactgggtttagaagatcagcctccaagccattaggtgtcatttgaaggtaaagagccagctgcaggccaggctcagtggttcacacctgtaatcccaacactttgggaggccaaggtgagcagatcacctgaggtcaggttcgaggccagcctggccaacatggtgaaaccccatctctactaaaaatacaaaaattagccagatgtggtggtccgtgcctgtgatcccagctactcgggaggctgaaacaggagaattgcttgaacccaggagacagaggttgcaatgagctgagatcacaccattgcactccagcctgggcaacaaaagtgaaactccatctcacaaaaaaaagagagagagagagagccaactgcagtactgcagtgatagcagtggggcttatgctttgtttaccagaagaagctttttagtgctttagacagtgagctggtctgtctaacccaagtgacctgggctccatactcagccccagaagtgaagggtgaagctgggtggagccaaaccaggcaagcctaccctcagggctcccagtggcctgagaaccattggacccaggacccattacttctagggtaaggaaggtacaaacaccagatccaaccatggtctggggggacagctgtcaaatgcctaaaaatatacctgggagaggagcaggcaaactatcactgccccaggttctctgaacagaaacagaggggcaacccaaagtccaaatccaggtgagcaggtgcaccaaatgcccagagatatgacgaggcaagaagtgaaggaaccacccctgcatcaaatgttttgcatgggaaggagaagggggttgctcatgttcccaatccaggagaatgcatttgggatctgccttcttctcactccttggttagcaagactaagcaaccaggactctggatttggggaaagacgtttatttgtggaggccagtgatgacaatcccacgagggcctaggtgaagagggcaggaaggctcgagacactggggactgagtgaaaaccacacccatgatctgcaccacccatggatgctccttcattgctcacctttctgttgatatcagatggccccattttctgtaccttcacagaaggacacaggctagggtctgtgcatggccttcatccccggggccatgtgaggacagcaggtgggaaagatcatgggtcctcctgggtcctgcagggccagaacattcatcacccatactgacctcctagatgggaatggcttccctggggctgggccaacggggcctgggcaggggagaaaggacgtcaggggacagggaggaagggtcatcgagacccagcctggaaggttcttgtctctgaccatccaggatttacttccctgcatctacctttggtcattttccctcagcaatgaccagctctgcttcctgatctcagcctcccaccctggacacagcaccccagtccctggcccggctgcatccacccaataccctgataacccaggacccattacttctagggtaaggagggtccaggagacagaagctgaggaaaggtctgaagaagtcacatctgtcctggccagaggggaaaaaccatcagatgctgaaccaggagaatgttgacccaggaaagggaccgaggacccaagaaaggagtcagaccaccagggtttgcctgagaggaaggatcaaggccccgagggaaagcagggccggctgcatgtgcaggacactggtggggcatatgtgtcttagattctccctgaattcagtgtccctgccatggccagactctctactcaggcctggacatgctgaaataggacaatggccttgtcctctctccccaccatttggcaagagacataaaggacattccaggacatggcttcctgggaggtccaggttctctgtctcacacctcagggactgtagttactgcatcagccatggtaggtgctgatctcacccagcctgtccaggcccttccactctccactttgtgaccatgtccaggaccacccctcagatcctgagcctgcaaatacccccttgctgggtgggtggattcagtaaacagtgagctcctatccagcccccagagccacctctgtcaccttcctgctgggcatcatcccaccttcacaagcactaaagagcatggggagacctggctagctgggtttctgcatcacaaagaaaataatcccccaggttcggattcccagggctctgtatgtggagctgacagacctgaggccaggagatagcagaggtcagccctagggagggtgggtcatccacccaggggacaggggtgcaccagccttgctactgaaagggcctccccaggacagcgccatcagccctgcctgagagctttgctaaacagcagtcagaggaggccatggcagtggctgagctcctgctccaggccccaacagaccagaccaacagcacaatgcagtccttccccaacgtcacaggtcaccaaagggaaactgaggtgctacctaaccttagagccatcaggggagataacagcccaatttcccaaacaggccagtttcaatcccatgacaatgacctctctgctctcattcttcccaaaataggacgctgattctcccccatcatggatttctcccttgtcccgggagccttttctgccccctatgatctgggcactcctgacacacacctcctctctggtgacatatcagggtccctcactgtcaagcagtccagaaaggacagaaccttggacagcgcccatctcagcttcacccttcctccttcacagggttcagggcaaagaataaatggcagaggccagtgagcccagagatggtgacaggcagtgacccaggggcagatgcctggagcaggagctggcggggccacagggagaaggtgatgcaggaagggaaacccagaaatgggcaggaaaggaggacacaggctctgtggggctgcagcccagggttggactatgagtgtgaagccatctcagcaagtaaggccaggtcccatgaacaagagtgggagcacgtggcttcctgctctgtatatggggtgggggattccatgccccatagaaccagatggccggggttcagatggagaaggagcaggacaggggatccccaggataggaggaccccagtgtccccacccaggcaggtgactgatgaatgggcatgcagggtcctcctgggctgggctctccctttgtccctcaggattccttgaaggaacatccggaagccgaccacatctacctggtgggttctggggagtccatgtaaagccaggagcttgtgttgctaggaggggtcatggcatgtgctgggggcaccaaagagagaaacctgagggcaggcaggacctggtctgaggaggcatgggagcccagatggggagatggatgtcaggaaaggctgccccatcagggagggtgatagcaatggggggtctgtgggagtgggcacgtgggattccctgggctctgccaagttccctcccatagtcacaacctggggacactgcccatgaaggggcgcctttgcccagccagatgctgctggttctgcccatccactaccctctctgctccagccactctgggtctttctccagatgccctggacagccctggcctggacctgtcccctgagaggtgttgggagaagctgagtctctggggacactctcatcagagtctgaaaggcacatcaggaaacatccctggtctccaggactaggcaatgaggaaagggccccagctcctccctttgccactgagagggtcgaccctgggtggccacagtgacttctgcgtctgtcccagtcaccctgaaaccacaacaaaaccccagccccagaccctgcaggtacaatacatgtggggacagtctgtacccaggggaagccagttctctcttcctaggagaccgggcctcagggctgtgcccggggcaggcgggggcagcacgtgcctgtccttgagaactcgggaccttaagggtctctgctctgtgaggcacagcaaggatccttctgtccagagatgaaagcagctcctgcccctcctctgacctcttcctccttcccaaatctcaaccaacaaataggtgtttcaaatctcatcatcaaatcttcatccatccacatgagaaagcttaaaacccaatggattgacaacatcaagagttggaacaagtggacatggagatgttacttgtggaaatttagatgtgttcagctatcgggcaggagaatctgtgtcaaattccagcatggttcagaagaatcaaaaagtgtcacagtccaaatgtgcaacagtgcaggggataaaactgtggtgcattcaaactgagggatattttggaacatgagaaaggaagggattgctgctgcacagaacatggatgatctcacacatagagttgaaagaaaggagtcaatcgcagaatagaaaatgatcactaattccacctctataaagtttccaagaggaaaacccaattctgctgctagagatcagaatggaggtgacctgtgccttgcaatggctgtgagggtcacgggagtgtcacttagtgcaggcaatgtgccgtatcttaatctgggcagggctttcatgagcacataggaatgcagacattactgctgtgttcattttacttcaccggaaaagaagaataaaatcagccgggcgcggtggctcacgcctgtaatcccagcactttagaaggctgaggtgggcagattacttgaggtcaggagttcaagaccaccctggccaatatggtgaaaccccggctctactaaaaatacaaaaattagctgggcatggtggtgcgcgcctgtaatcccagctactcgggaggctgaggctggacaattgcttggacccaggaagcagaggttgcagtgagccaagattgtgccactgcactccagcttgggcaacagagccagactctgtaaaaaaaaaaaaaaaaaaaaaaaaaaaaaaaaagaaagaaagaaaaagaaaagaaagtataaaatctctttgggttaacaaaaaaagatccacaaaacaaacaccagctcttatcaaacttacacaactctgccagagaacaggaaacacaaatactcattaactcacttttgtggcaataaaaccttcatgtcaaaaggagaccaggacacaatgaggaagtaaaactgcaggccctacttgggtgcagagagggaaaatccacaaataaaacattaccagaaggagctaagatttactgcattgagttcattccccaggtatgcaaggtgattttaacacctgaaaatcaatcattgcctttactacatagacagattagctagaaaaaaattacaactagcagaacagaagcaatttggccttcctaaaattccacatcatatcatcatgatggagacagtgcagacgccaatgacaataaaaagagggacctccgtcacccggtaaacatgtccacacagctccagcaagcacccgtcttcccagtgaatcactgtaacctcccctttaatcagccccaggcaaggctgcctgcgatggccacacaggctccaacccgtgggcctcaacctcccgcagaggctctcctttggccaccccatggggagagcatgaggacagggcagagccctctgatgcccacacatggcaggagctgacgccagagccatgggggctggagagcagagctgctggggtcagagcttcctgaggacacccaggcctaagggaaggcagctccctggatgggggcaaccaggctccgggctccaacctcagagcccgcatgggaggagccagcactctaggcctttcctagggtgactctgaggggaccctgacacgacaggatcgctgaatgcacccgagatgaaggggccaccacgggaccctgctctcgtggcagatcaggagagagtgggacaccatgccaggcccccatggcatggctgcgactgacccaggccactcccctgcatgcatcagcctcggtaagtcacatgaccaagcccaggaccaatgtggaaggaaggaaacagcatcccctttagtgatggaacccaaggtcagtgcaaagagaggccatgagcagttaggaagggtggtccaacctacagcacaaaccatcgtctatcataagtagaagccctgctccatgacccctgcatttaaataaacgtttgttaaatgagtcaaattccctcaccatgagagctcacctgtgtgtaggcccatcacacacacaaacacacacacacacacacacacacacacacacagggaaagtgcaggatcctggacagcaccaggcaggcttcacaggcagagcaaacagcgtgaatgacccatgcagtgccctgggccccatcagctcagagaccctgtgagggctgagatggggctaggcaggggagagacttagagagggtggggcctccagggagggggctgcagggagctgggtactgccctccagggagggggctgcagggagctgggtactgccctccagggagggggctgcagggagctgggtactgccctccagggagggggctgcagggagctgggtactgccctccagggagggggctgcagggagctgggtactgccctccagggaggcaggagcactgttcccaacagagagcacatcttcctgcagcagctgcacagacacaggagcccccatgactgccctgggccagggtgtggattccaaatttcgtgccccattgggtgggacggaggttgaccgtgacatccaaggggcatctgtgattccaaacttaaactactgtgcctacaaaataggaaataaccctactttttctactatctcaaattccctaagcacaagctagcaccctttaaatcaggaagttcagtcactcctggggtcctcccatgcccccagtctgacttgcaggtgcacagggtggctgacatctgtccttgctcctcctcttggctcaactgccgcccctcctgggggtgactgatggtcaggacaagggatcctagagctggccccatgattgacaggaaggcaggacttggcctccattctgaagactaggggtgtcaagagagctgggcatcccacagagctgcacaagatgacgcggacagagggtgacacagggctcagggcttcagacgggtcgggaggctcagctgagagttcagggacagacctgaggagcctcagtgggaaaagaagcactgaagtgggaagttctggaatgttctggacaagcctgagtgctctaaggaaatgctcccaccccgatgtagcctgcagcactggacggtctgtgtacctccccgctgcccatcctctcacagcccccgcctctagggacacaactcctgccctaacgtgcatctttcctgtctcattccacacaaaagggcctctggggtccctgttctgcattgcaaggagtggaggtcacgttcccacagaccacccagcaacagggtcctatggaggtgcggtcaggaggatcacacgtccccccatgcccaggggactgactctgggggtgatggattggcctggaggccactggtcccctctgtccctgaggggaacctgcaccctggaggctgccacatccctcctgattctttcagctgagggcccttcttgaaatcccagggaggactcaacccccactgggaaaggcccagtgtggacggttccacagcagcccagctaaggcccttggacacagatcctgagtgagagaacctttagggacacaggtgcacggccatgtccccagtgcccacacagagcaggggcatctggaccctgagtgtgtagctcccgcgactgaacccagcccttccccaatgacgtgacccctggggtggctccaggtctccagtccatgccaccaaaatctccagattgagggtcctcccttgagtccctgatgcctgtccaggagctgccccctgagcaaatctagagtgcagagggctgggattgtggcagtaaaagcagccacatttgtctcaggaaggaaagggaggacatgagctccaggaagggcgatggcgtcctctagtgggcgcctcctgttaatgagcaaaaaggggccaggagagttgagagatcagggctggccttggactaaggctcagatggagaggactgaggtgcaaagagggggctgaagtaggggagtggtcgggagagatgggaggagcaggtaaggggaagccccagggaggccgggggagggtacagcagagctctccactcctcagcattgacatttggggtggtcgtgctagtggggttctgtaagttgtagggtgttcagcaccatctggggactctacccactaaatgccagcaggactccctccccaagctctaacaaccaacaatgtctccagactttccaaatgtcccctggagagcaaaattgcttctggcagaatcactgatctacgtcagtctctaaaagtgactcatcagcgaaatccttcacctcttgggagaagaatcacaagtgtgagaggggtagaaactgcagacttcaaaatctttccaaaagagttttacttaatcagcagtttgatgtcccaggagaagatacatttagagtgtttagagttgatgccacatggctgcctgtacctcacagcaggagcagagtgggttttccaagggcctgtaaccacaactggaatgacactcactgggttacattacaaagtggaatgtggggaattctgtagactttgggaagggaaatgtatgacgtgagcccacagcctaaggcagtggacagtccactttgaggctctcaccatctaggagacatctcagccatgaacatagccacatctgtcattagaaaacatgttttattaagaggaaaaatctaggctagaagtgctttatgctcttttttctctttatgttcaaattcatatacttttagatcattccttaaagaagaatctatccccctaagtaaatgttatcactgactggatagtgttggtgtctcactcccaacccctgtgtggtgacagtgccctgcttccccagccctgggccctctctgattcctgagagctttgggtgctccttcattaggaggaagagaggaagggtgtttttaatattctcaccattcacccatccacctcttagacactgggaagaatcagttgcccactcttggatttgatcctcgaattaatgacctctatttctgtcccttgtccatttcaacaatgtgacaggcctaagaggtgccttctccatgtgatttttgaggagaaggttctcaagataagttttctcacacctctttgaattacctccacctgtgtccccatcaccattaccagcagcatttggaccctttttctgttagtcagatgctttccacctcttgagggtgtatactgtatgctctctacacaggaatatgcagaggaaatagaaaaagggaaatcgcattactattcagagagaagaagacctttatgtgaatgaatgagagtctaaaatcctaagagagcccatataaaattattaccagtgctaaaactacaaaagttacactaacagtaaactagaataataaaacatgcatcacagttgctggtaaagctaaatcagatatttttttcttagaaaaagcattccatgtgtgttgcagtgatgacaggagtgcccttcagtcaatatgctgcctgtaatttttgttccctggcagaatgtattgtcttttctccctttaaatcttaaatgcaaaactaaaggcagctcctgggccccctccccaaagtcagctgcctgcaaccagccccacgaagagcagaggcctgagcttccctggtcaaaatagggggctagggagcttaaccttgctcgataaagctgtgttcctagaatgtcgctcctgttcccaggggcaccagcctggagggtggtgagcctcactggtggcctgatgcttaccttgtgccctcacaccagtggtcactggaaccttgaacacttggctgtcgcccggatctgcagatgtcaagaacttctggaagtcaaattactgcccacttctccagggcagatacctgtgaacatccaaaaccatgccacagaaccctgcctggggtctacaacacatatggactgtgagcaccaagtccagccctgaatctgtgaccacctgccaagatgcccctaactgggatccaccaatcactgcacatggcaggcagcgaggcttggaggtgcttcgccacaaggcagccccaatttgctgggagtttcttggcacctggtagtggtgaggagccttgggaccctcaggattactccccttaagcatagtggggacccttctgcatccccagcaggtgccccgctcttcagagcctctctctctgaggtttacccagacccctgcaccaatgagaccatgctgaagcctcagagagagagatggagctttgaccaggagccgctcttccttgagggccagggcagggaaagcaggaggcagcaccaggagtgggaacaccagtgtctaagcccctgatgagaacagggtggtctctcccatatgcccataccaggcctgtgaacagaatcctccttctgcagtgacaatgtctgagaggacgacatgtttcccagcctaacgtgcagccatgcccatctacccactgcctactgcaggacagcaccaacccaggagctgggaagctgggagaagacatggaatacccatggcttctcaccttcctccagtccagtgggcaccatttatgcctaggacacccacctgccggccccaggctcttaagagttaggtcacctaggtgcctctgggaggccgaggcaggagaattgcttgaacccgggaggcagaggttgcagtgagccgagatcacaccactgcactccagcctgggtgacagaatgagactctgtctcaaaaaaaaagagaaagatagcatcagtggctaccaagggctaggggcaggggaaggtggagagttaatgattaatagtatgaagtttctatgtgagatgatgaaaatgttctggaaaaaaaaatatagtggtgaggatgtagaatattgtgaatataattaacggcatttaattgtacacttaacatgattaatgtggcatattttatcttatgtatttgactacatccaagaaacactgggagagggaaagcccaccatgtaaaatacacccaccctaatcagatagtcctcattgtacccaggtacaggcccctcatgacctgcacaggaataactaaggatttaaggacatgaggcttcccagccaactgcaggtgcacaacataaatgtatctgcaaacagactgagagtaaagctgggggcacaaacctcagcactgccaggacacacacccttctcgtggattctgactttatctgacccggcccactgtccagatcttgttgtgggattgggacaagggaggtcataaagcctgtccccagggcactctgtgtgagcacacgagacctccccacccccccaccgttaggtctccacacatagatctgaccattaggcattgtgaggaggactctagcgcgggctcagggatcacaccagagaatcaggtacagagaggaagacggggctcgaggagctgatggatgacacagagcagggttcctgcagtccacaggtccagctcaccctggtgtaggtgccccatccccctgatccaggcatccctgacacagctccctcccggagcctcctcccaggtgacacatcagggtccctcactcaagctgtccagagagggcagcaccttggacagcgcccaccccacttcactcttcctccctcacagggctcagggctcagggctcaagtctcagaacaaatggcagaggccagtgagcccagagatggtgacagggcaatgatccaggggcagctgcctgaaacgggagcaggtgaagccacagatgggagaagatggttcaggaagaaaaatccaggaatgggcaggagaggagaggaggacacaggctctgtggggctgcagcccaggatgggactaagtgtgaagacatctcagcaggtgaggccaggtcccatgaacagagaagcagctcccacctcccctgatgcacggacacacagagtgtgtggtgctgtgcccccagagtcgggctctcctgttctggtccccagggagtgagaagtgaggttgacttgtccctgctcctctctgctaccccaacattcaccttctcctcatgcccctctctctcaaatatgatttggatctatgtccccgcccaaatctcatgtcaaattgtaaaccccaatgttggaggtggggccttgtgagaagtgattggataatgcgggtggattttctgctttgatgctgtttctgtgatagagatctcacatgatctggttgtttaaaagtgtgtagcacctctcccctctctctctctctctcttactcatgctctgccatgtaagacgttcctgtttccccttcaccgtccagaatgattgtaagttttctgaggcctccccaggagcagaagccactatgcttcctgtacaactgcagaatgatgagcgaattaaacctcttttctttataaattacccagtctcaggtatttctttatagcaatgcgaggacagactaatacaatcttctactcccagatccccgcacacgcttagccccagacatcactgcccctgggagcatgcacagcgcagcctcctgccgacaaaagcaaagtcacaaaaggtgacaaaaatctgcatttggggacatctgattgtgaaagagggaggacagtacacttgtagccacagagactggggctcaccgagctgaaacctggtagcactttggcataacatgtgcatgacccgtgttcaatgtctagagatcagtgttgagtaaaacagcctggtctggggccgctgctgtccccacttccctcctgtccaccagagggcggcagagttcctcccaccctggagcctccccaggggctgctgacctccctcagccgggcccacagcccagcagggtccaccctcacccgggtcacctcggcccacgtcctcctcgccctccgagctcctcacacggactctgtcagctcctccctgcagcctatcggccgcccacctgaggcttgtcggccgcccacttgaggcctgtcggctgccctctgcaggcagctcctgtcccctacaccccctccttccccgggctcagctgaaagggcgtctcccagggcagctccctgtgatctccaggacagctcagtctctcacaggctccgacgccccctatgctgtcacctcacagccctgtcattaccattaactcctcagtcccatgaagttcactgagcgcctgtctcccggttacaggaaaactctgtgacagggaccacgtctgtcctgctctctgtggaatcccagggcccagcccagtgcctgacacggaacagatgctccataaatactggttaaatgtgtgggagatctctaaaaagaagcatatcacctccgtgtggcccccagcagtcagagtctgttccatgtggacacaggggcactggcaccagcatgggaggaggccagcaagtgcccgcggctgccccaggaatgaggcctcaacccccagagcttcagaagggaggacagaggcctgcagggaatagatcctccggcctgaccctgcagcctaatccagagttcagggtcagctcacaccacgtcgaccctggtcagcatccctagggcagttccagacaaggccggaggtctcctcttgccctccagggggtgacattgcacacagacatcactcaggaaacggattcccctggacaggaacctggctttgctaaggaagtggaggtggagcctggtttccatcccttgctccaacagacccttctgatctctcccacatacctgctctgttcctttctgggtcctatgaggaccctgttctgccaggggtccctgtgcaactccagactccctcctggtaccaccatggggaaggtggggtgatcacaggacagtcagcctcgcagaggacagagaccacccaggactgtcagggagaacatggacaggccctgagccgcagctcagccaacagacacggagagggagggtccccctggagccttccccaaggacagcagagcccagagtcacccacctccctccaccacagtcctctctttccaggacacacaagacacctccccctccacatgcaggatctggggactcctgagacctctgggcctgggtctccatccctgggtcagtggcggggttggtggtactggagacagagggctggtccctccccagccaccacccagtgagcctttttctagcccccagagccacctctgtcaccttcctgttgggcatcatcccaccttcccagagccctggagagcatggggagacccgggaccctgctgggtttctctgtcacaaaggaaaataatccccctggtgtgacagacccaaggacagaacacagcagaggtcagcactggggaagacaggttgtcctcccaggggatgggggtccatccaccttgccgaaaagatttgtctgaggaactgaaaatagaagggaaaaaagaggagggacaaaagaggcagaaatgagaggggaggggacagaggacacctgaataaagaccacacccatgacccacgtgatgctgagaagtactcctgccctaggaagagactcagggcagagggaggaaggacagcagaccagacagtcacagcagccttgacaaaacgttcctggaactcaagctcttctccacagaggaggacagagcagacagcagagaccatggagtctccctcggcccctccccacagatggtgcatcccctggcagaggctcctgctcacaggtgaagggaggacaacctgggagagggtgggaggagggagctggggtctcctgggtaggacagggctgtgagacggacagagggctcctgttggagcctgaatagggaagaggacatcagagagggacaggagtcacaccagaaaaatcaaattgaactggaattggaaaggggcaggaaaacctcaagagttctattttcctagttaattgtcactggccactacgtttttaaaaatcataataactgcatcagatgacactttaaataaaaacataaccagggcatgaaacactgtcctcatccgcctaccgcggacattggaaaataagccccaggctgtggagggccctgggaaccctcatgaactcatccacaggaatctgcagcctgtcccaggcactggggtgcaaccaagatcacacaaatccctgccctcatgaagctcatgctctcatggggaggaagacagacatacaaagagatctagaatgtgaggtcaggtgttgacaagagccctggagggaatagagcagggaaaggtcagaaaaggaagacccagggtctctagaggaggtgtcagggaagggatctcccaagaatgccctgatgtgagcaggacctgaaggcaatggggagggagccgtgaagacccctggaaaagcagattccacacagggaaatgccaaggtcagaggtgctaaggaaataggagacacactgctgaccttgacctagtaggacacacacacacacacacacacacacacactcactcactccagggctgggggatgaagagacctgctcaggacccaggaccccatttttccaccctaatgcataggtcccaatattgaccgatgctctctgctctctcctagcctcacttctaaccttctggaacccgcccaccactgccaagctcactattgaatccacgccgttcaatgtcgcagaggggaaggaggtgcttctacttgtccacaatctgccccagcatctttttggctacagctggtacaaaggtgaaagagtggatggcaaccgtcaaattataggatatgtaataggaactcaacaagctaccccagggcccgcatacagtggtcgagagataatataccccaatgcatccctgctgatccagaacatcatccagaatgacacaggattctacaccctacacgtcataaagtcagatcttgtgaatgaagaagcaactggccagttccgggtataccgtgagtgattcccccatgacctctgggtgttgggggtcagttctacttcccacacacaggattatcaggcctgggctgtgcctgtggccccctctgcattacgcaccatgttagggtttgggcatttagtgcaggatacacacagaagagacaaacttcaacagatcagaattcctttccggcatccagaccctgcagacactcactgcagaggaaggacagtctgatgtgggggacttagcagggggaggtcagtctcagccaagcaccccgtgccctccccgtaaacctgaccctgagaaagaccctggagaactgcatcagagcctggcctgagggacccctgggatattcacagagaagctcagccccagggctcctggttccaggtgactcaggggagcctgtgccagggctgtgttgtggcctcctgggcaaggctaactggaagcaaggacttagcagctgtccaagggctgtggctcctggagctggattctggatgcagaatcggactttctggccacacttgttccctgtccccagagtctcatttggacaaggacagagccttgtcctttacttgagactcaatgtggggaggatagatagacaaggttattagggtgtcagtccattgccctggggacataggtgactccatgggaagctcagtgtccccaggaagaggaacagaggagagaagatgctcccggcagctccttgtccaccagggatcaggcccagggccttctctcttggaggcaaataaacataaatgatgttcatttgagcagctcctctgtgcagagctgagatcaagtaattgtaaatattttgaggttaattcacaaacaacctcacagccaaatagcacttatcctacttattgaaaggaaattgaggcacagggagacagtcactaacaagggtcacacaggccataggtgtcagattgaagtcacatgaggtctgtctgtagccacagccccctcctctcctcaactgggggtgggtggggctgtttgttgttaggcatctgcatctgagaccagtcatgggcttgcgttcttttgtcttgggcatccacagctcagaagcggagattctggtctggagagtgataagtaaatggagaaataatcagttttactctagaactagatcacctcaacagtcagggtcagtgccgggattgtccaggcctctccctgagatccacagccccctcacatgacctcaaatcctgtgtttcccgatgtgtcagtgtcactcccacggaaggataaaggaaaggacttcgctttctctccccactcacaccctgtgccaacagaggcccaaagtgagacacacgcttgctcagtagctctctcatgaaggggggaatgagtgaaggaatgatccataacctctatagagactggatcctggatgcagaatcctgggaggttctgaccacacctgttccgtgtccatcaggggctgagatccatgtaccattcctctgaccccctgtcccgaaagccaccctatctcatgtgactctggggttccttggccatgggagggttttcaaggctccctggtcctggtcgggacagccaagggactcctagtcctggggtctccgaggtcactataccccgcatggctcattgccatgggcatttctgactttcttctattcctccatgttcttcgtcttcctccctcttcattccagctgagatgcccatccctgaacatcttcctccactcttaggccttccccagacactcccttgaacaaggctggctgtcctgttttcttgccgctcacactgtgtcctggcccacttcccaggcaatagggaaggcacagaaatcacaggcaatagggaaggcacagatggagcccctgccaggctccatcacaagccaatgtcaacaggtcaccaggagaatgagcttccgctgtgttcctgcccagggctctttacttccatgaggccaacacacggaacaggcagcaggacgggaatgagcgactcctccatccactccctacactgactcaccagggggtcagaggcagaaggacaggtctgcagtccccaaagcccgcatgcttatttcactcacttcactacccactccatcttcatcctggtgtggggctcacatcctccagtggatcctgggacctcccccaggtggagctggccaggcaggtgctgtctgataggtttgctgcccattccacatacacctgtgtcctcatgatgatgccattgtcataaggtggagtcccttggactgagaagtgaaccagccactggcgtctcacttagactctacccagttacaaaaacttaaactctagttgtgttttctgaggttgataggagaggaagaaaacctttcacatgcctgttttgaggcttctcctctttttgcctaactctgcacaggaactaggggcagggagcgctttctaaatttactaacatcacacacattgcttctcctaacttggcatcatttctccctttatgtaattgacacacctaagagttcctctctgaccggttctgtcctcttaacaggtctcacatccctctctctgttcagggagtcactgatttcaaaccactttcagcatcttcctttgagcataatgtgatcactttggaattcagagcagacctaaaccttagcataatattaaaagaagtactacttccagcaattgatcttagatctttaggccattgataagaatttccacttatggaaaaaatttaatgtttcccccaaatgtctttcacttttttaactatagtcagaaaataacatgagatctaaactcctgacaaatttttaagggcaaattatagtactacagattgagtatcccaaatcctaaaatccaaaatctgaaatgctccaaaatccaacattttttgaccactgacatgattctcaaaagaaatgctcactgaaggccgggcacggtggctcatgcctgtaatcccagcacttcgggaggccaaggcgggaagatcacaaagtcaagagatcaagaccatcctggccaacatggtgaaaccccgtctctactaaaaatacaaaaattagctgggcgtggtggcatgcacctacagtctcagctactttggaggctgaggcaggagaatcgcttgaacccgggaggtggaggttgcagtgagctgagatcgtgccactgcactccagcctggcaacagagcgagactccatctcaaaaaaaagaaaaagaaagaaaagaaaagaaaaaagaaaggctcactggagcactttggattccgtattttcagatttggggtgctaaactggtaagtatattgcaaatattcaaaactcaaaaacagtcagaaatccaaaacacttttagtcctaagccttacacataagacatactcaatctgtatgaactataggcaccaagctgaacagcagatccctagaacctcctcatcctgcataactgaaactgcagacccatgaacaactctccattcccccagttcccaggctttgacaaccaccattctactctctgattccacaagtgtgactactctagggacttcatataagtggaatcctacagtatctgccctgtgagtggcttatttcatttagcataatgtccaatgggagaaaataattgcaaaacttcttctcaaagttctgtctcataactgtcaaacacacatggtccttgagggccagatttccagcagttcatgctcccccttttccaccagtcagttctgcatttgcaaatgtccacatgtatttatggagagatccacagcatcctcgcctgccctctgcaaggggagaagggacattaaagaccaaagacaggccgggtgcagtggctcatgcttgtaatcccagcactttgggaggccaaggtgggcagaacacctgaggtcagaagttcaagaccagcctgaccaatatggtgaaaccccatctctactaaaaatacaaaatttagctgggtgtggtggtgggcgcctgtagtcccagctactcgggaggctgagacaggagaatcgcttgaacccgggaggcagaggttgccatgagccgagatcgtgcctggccaacacagcaagactccatctcaaaaaacaaacaaacaaacaaagaccaaagacaaagaacatacatatggttctgctgttaaatccgggcagctcctgcctgtcacctgaagttctagatcattccctggactccactctatctttaggggtctctggctcaagtcagtcatcatcaaacacctgggaaaaactgccccaccttgtgcctccactgcctaacgactgagctgacctccaggcttgcctctggtgtcccctgtgttatttctactgaaacatccagtcccaggccaggctgcacaatatgtacagggtttaaggacaatgggaagacccatcactatccatttctaggatgtccttgcaaagggaaaccacagaaaaaatatacctagggaaacaaagtaggactgaaggtggaagggacccagcacttgaatgttccaggtgaggaccctacagtgggccaagtagtcaactggtcagggagggaccaggagaggcaccaggagctgtgacctcccccccagtcctgtgtctgttcacagcccaatgctgctgcttaattcacacttgagaaagtctgtgcttcccccacaccgagcaggcagcctcgcagtctctgagatctcagatcatcgtgcatctgtcttgtgacacatgcacccaccgtgggtttttaagggctcaggtgggctgagaggtggaaggtgccaactctgattgaaagatgcctgtgaggaatcaaaggtgccacacagggcaatcttctctctgttatctgcacagcggagctgcccaagccctccatctccagcaacaactccaaacccgtggaggacaaggatgctgtggccttcacctgtgaacctgagactcaggacgcaacctacctgtggtgggtaaacaatcagagcctcccggtcagtcccaggctgcagctgtccaatggcaacaggaccctcactctattcaatgtcacaagaaatgacacagcaagctacaaatgtgaaacccagaacccagtgagtgccaggcgcagtgattcagtcatcctgaatgtcctctgtgagtatatctgctcctctctggcccaggctgccagcccaaatccacagggccagaggcaggatttctcagtccctctcaggttcaagtacacagaccctcaaccctggacatccagactgtctgtgactttctgccccagaaaaacctgggcagaccaagtcttgaccaagaataggaggggaggggctgcttctgtcctgggaggctcagggtccacaccctatgatgggagaaacaggtgaatatctcagactcaggctcagtagatacaagaggggtttggctgagactttaggattgtgattcagcttagagggacactgtggtccttccatagaccaggaacttccacttccctctgacaatatcacctgtggctttattttgtttgctccagatggcccggatgcccccaccatttcccctctaaacacatcttacagatcaggggaaaatctgaacctctcctgccacgcagcctctaacccacctgcacagtactcttggtttgtcaatgggactttccagcaatccacccaagagctctttatccccaacatcactgtgaataatagtggatcctatacgtgccaagcccataactcagacactggcctcaataggaccacagtcacgacgatcacagtctatggtaagtggatccacgaagcactgacatcatgttttgaggtggagtctgtctggttttcaaacaagagccaggaagacattttctatcccagcctgtgtccagtgggcacaagcaaatcccagattctcccactgaacctccccaatatgtctctacagactcttttcttcttgttctgatttctcatggcgggccccaggtccagcttggaatgtggggaggaggctccctcagccccacagccctgtgtagtggaggaagcttcacagagcgggaaggagcaagggttctcaaggtcaagttgcttctctctgtcaccaatgtgtccctttctgtcacctctttgtgttcttttgcctactccatgagctacaagcaacattcaaggctttgaaacaagctcatacttttttcccaaatgagagaaggaagccccttgggtgagggagacacagctcagactgctccctgctctgctctgggctcccctgggtgactggccttgcctgactccacctaggtgggaacgaggtgtgtggagaaggagcccgggtggtctgtcctgaattcggctaaatcaagctgccaatcaacaccaaagcttcccttcgtcccagtcaggctgcaggaaaatggaaagagagggagcctcagggcagactcctgagctgcgtcctggctctgatgtcaccagctatatgaggctgtgggcacagcacatgggacacagcacaggggacagcaagtgacccacacttggagaaatcaggagattcaccacaggggctctgcacggcagggaatggcagtgtcaaaaatcgtgtgtttatacagatggtaacagtacatatctaacacaaacttaccatcttaacttttctacacatgcagttcagtggtattaaatatattccccttgttctgcttccatcaccaccatctacccacaggactcttttcttcctcccaaaatgaaactctgttcccatcaaactcctgggcagagctgccccatctatggcccacagtctgatccctgacttgtcacctctagacatgctcctagtctcctgcactatttctgctcaaacatccatctccatcatcacctatctctaggatgtccttaaatagcaaagcctcagagcaaacacaacttggctgggtggtgtgggactgtgcagctggaagaaacgcagctccttcaaattccaggtgaggaccccaatgggccaggcagccagccagtcaggaaaggaccagaagtgctgggggctgtgacccccagccctgtgtctgtccacaacccaatgctactgcccaattcacacttgagaaagtctgtgcttctcccacacaaaacagccagcctcatggtctctgagccctcagatcattgtgcatctgtcttgtgacgcacacacacctgccatgagcttttaaggactcagttgggctgagaggtgggagatgccaactctgattgatagatgcccgtggaggaatcacaggtgccacacagggcaatcttctctctgttatctgcacagcagagccacccaaacccttcatcaccagcaacaactccaaccccgtggaggatgaggatgctgtagccttaacctgtgaacctgagattcagaacacaacctacctgtggtgggtaaataatcagagcctcccggtcagtcccaggctgcagctgtccaatgacaacaggaccctcactctactcagtgtcacaaggaatgatgtaggaccctatgagtgtggaatccagaacgaattaagtgttgaccacagcgacccagtcatcctgaatgtcctctgtgagtatcttctgttcctctgtggctcaggctgccagcccaaatccacatagccaaagtccaggcctctcagtccctctcaggcccaaggacagagacttttacccctggacatccaggctggccctacccccagcaaatccatgcaggcccagtcctgaccaagaataggaggggagggtctgctcctgtcctgtaacactcgggatccacagctagtgatgggagaaacagatgaatgtctcagactctggctaattggatacagtaggggtttggttaggacttcaggattgtgacttggctcagggggacactgttgccctttcacagaccaggagcttcccctttgctctgatgacattcacctgtggccctattctctttgctccagatggcccagacgaccccaccatttccccctcatacacctattaccgtccaggggtgaacctcagcctctcctgccatgcagcctctaacccacctgcacagtattcttggctgattgatgggaacatccagcaacacacacaagagctctttatctccaacatcactgagaagaacagcggactctatacctgccaggccaataactcagccagtggccacagcaggactacagtcaagacaatcacagtctctggtaagtggatccctggaccgttagcaatatgttctggagcggaatctgtctggttttcagaaaagagccaggaagaaattttctttcctagtatgcatccaatgggcacaagcaatcccaaattcaatcctgagcactcccaatttgtctctacaaacactcttccccttgtttttctgatttctcatggctgaccttgtgtccaccctgagaaatgtggggaggggtcttcatcagccctgagccctatgtagtggaaggggcttcacagagggggaagcaagaagggtcctcaaggtcaagttgctcctctctgtcaccaatatgtccctttctgacaccactttgtgttcttttacctaatccatgagctacaaggaacaactgaggctttgaaacaagctcacactttttccccaaatgagaggaggatgccccttggatgagggaggagcagctcagactctgctcccggctccgctccgggctcccccagtgactggccctgccctgatttcacctggggtgggatccgggcatgtggagaaggtgctcaggtggcctgtcctgaatctggctaagtcaagatgccagatgaagccaagccttcccagggtcaggctacagggaaataagaagagagggagcctcggggcagactcctgagctgtgtcctggagtctgaagtcaccggctgtatgagattgtgggcacagcacatgggacacagcacagaagacagtcagtggcacacacttggagacacacagagattcacccatggggactcaacatggcagggaaggggcagtgccaaaaagtgtgtgtttatagacagggtaagaataccagccactatatatatctaacataagacaccattttaacctttctatgtatgcagtttagtagcattaaatattttcccattattctgctaccatcatcaccatccacccacagaactcttttcttcttcctaaaatgaaactctgttcccatcaaactcttgggtagagctgcccacctgtggcccacagcctgacccctgaactcacctctagacttgctcctggtctcctgagctatttctgcttaaacacccatccccgtcatcacccatctccaggatagccttgaaacaaaaggctcagagaaaacaccccacggttgggtggtgtgggaccgtgcagctgaacggaattcagcacccacaagtccccaggttggccaggccgtcagccatcagggaagaaccaaaggaggtgctgggggctgtgactcccagtcctgggtctgtccacaacccaacgctgctgcccaattcacacttgagaaagtctgtgcttcccccacacaaagcagccggccttacagtctctgagccctcagatcatcgtacatctgtcttgtgatacacacacctgccatgggcttttaaggactcgggtgggctgaagggtgggagttgccaactctgattgaaagatgcctgtgaggaatcaaaagtgccacacagggcaatcttctctctgttatctgcacagcggagctgcccaagccctccatctccagcaacaactccaaacccgtggaggacaaggatgctgtggccttcacctgtgaacctgaggctcagaacacaacctacctgtggtgggtaaatggtcagagcctcccagtcagtcccaggctgcagctgtccaatggcaacaggaccctcactctattcaatgtcacaagaaatgacgcaagagcctatgtatgtggaatccagaactcagtgagtgcaaaccgcagtgacccagtcaccctggatgtcctctgtgagtatcttctgttcctctgtggccctggtttccaacccaaatccacacagccagaggccaggactctcagttctcctcaggtccaaagaggcagactcccacccctggacacccaggctggccataacttcctgtcccaggaaaatttgggcaacctcagcctggaccaagaataggaggggagaggctgctcctgtcctaggaggctcagagtccacagcctatgatgggagaaacagatgaacgtctcagacccagactcagtggacatgagggttatggtttggacttttttttttttttttttttttttgagacggagtctcgctctttcgcccaggctggactgcagtggtgtgatctcggctcactgcaagctccgcctcctaggttcacaccattctcctgcctcagcctcccgagtaactgggattacacacacgtgccgccatgcccagctaatgttttttgtatttttagtagagacggggtttcaccatgttggtcaggctggtctcgaactcctgatctgcccgcctcggcctcccaaagtgctgggattacaggcgtgagccaccgcacccggccgatttggactttttaacacaggattgggacaggattcagagggacactgtggcccttctacaatcaggagcttcccctttcctctgatgacatcacctgtggctttgttctctttgttccagatgggccggacacccccatcatttcccccccagactcgtcttacctttcgggagcgaacctcaacctctcctgccactcggcctctaacccatccccgcagtattcttggcgtatcaatgggataccgcagcaacacacacaagttctctttatcgccaaaatcacgccaaataataacgggacctatgcctgttttgtctctaacttggctactggccgcaataattccatagtcaagagcatcacagtctctggtaagtggctccctggagcatcagcatcatattctggggtggagtctatctggttctcaccaaagagccaagaagacattttctttcccagtctgtgttccatgggcacaaggaaatcccaaattctatcctgagccccctcactccatctcggccaactctctcctccccggcttctctgatatctcacggctgacctcgggtccagcctggaatgtggggaggggcctcccttagccccagaaggcccccaatagtgaaagggacttcatagtccagaagaaagaagggtccttaaggtcgagttgctcctctctatcaccaatatgtccctttctgtcacctctttgtgttttttcacctactctgtgagctacaaggaacaaggaggctttgaaaccagcccacactttttccccaaatgagaggaggaagccccttggatgaggcaggagcagctcagactctgctccctgctctgcgcccggctcacccggtgactggctctgccctggctccacttggggtgggaccggggcatgtggagaaggtgtccaggtggcctgttttgaatctgggtaaatcaagctgccaatccacagcagagcctcccttgggtcaggttgcagggaaatgggaaaagagggagcctcgggacagactcctgagctgtgtcctggctctgaagtcactggctgtatgaggctgtggacacagcacataggacacagcagaggaaagtgagtgacacacacttggagaaatagggagattcagccataggggctctgcatgggagggaacaggcagtgccaaaaagtgtgtgtttatagagagggtaagactatcagccactatatatatctaacataaaacttaccattaaccatttctaagtgtacaattaagtgaaacagcataaatatcaatcaagtatattgcccggtgtggtggctcatccctgtaatcccagcactttgggaggccaaggcgagtggatcacctgaggtcaggagttcaagatacagaaaaaaaaaaatagctaggcatggtggtgggtgcctgtaatcccagctactcgggaggctgaggcaggagaatcgctcgaacctgggcggtgtagtttgcagtgagccgagattgagccactgcactccagcctgggtgacagagtgagactacatcacaaaaaaaaaaaaaaaaaggaaaaaataaatcaagtctttttatactcatgtctaaccatcacatcacactatccatttccagaactttttcatcttaccatactaaacctctgtacccaataaacagtaactccttctctcccctaaactctggtaatctccattctactttctgtctctaggtaatcaactattctaacgatcttacaaaaatggaattatataatagttgtccttttgtgtctgccctatttcacttagcataatgtcttcaaggttcatccattttgcaccatgtatcacaatttcttccttgttaaggttgaagaacattccattgtatggatacacctcatttttctatccacttatctttcaatggacttttcagttgtttccaccttttggctattgtgagtaatgctgctgtgaacatcagtgtacaaatatctgttcaaatcactgccttcaattctttttggtgtatgtccagaaatggaattggtagatcaaatgttaattcttttttttgtttgtttgtttgtttgtttgtttgttttttgagatggagtctcgctctgtcgaccaggctggagtgcactggcgcgatctcggctcactgcaagctccgcctcccgtgttcacgccattctcctgcctcagcctcccgagtagctgggactacaggtgcccgccaacaagcttggctaatttttttttttttatttttagtagagactgagtttcacagtgttagccaggatggtctcgatctcctgacctcgtgatccgcctgccttggcctcccaaagtgctgggattacaggcatgagccaccgtgtccggccccaaatgttaattatttatttaattttttgaggaaccaccataccattttccacagtagctaatatttcacatttctatcagcaatgcactagagttccaatttttccacctccttgaaaacacttattgttttgtggccatcctgatgtgtgtgaggtggagtatcattgtggctttgacttgcatatctctaagtgttagtgatgttgagcatatttgcatgtgcttgttggccatttgtatatcttcctaggagaaatctctactttagtcctttgtccatttattaattgggattttggatttttgtggttgttgatttgtaagagttcttcatatattctggaaattaatcccttatcagatatatgatttgcaaatatatttcccatttcataggttgccttttcactttctcgataatgttctttaatatataaaagtttttaattttcgaggccctgcacggtggttcctgtaatcccagcactttgggaggccgaggcaggtagattacaaggtcaggagatcaagaccatcctggctaacacagtgaaaccccgtctctactaaaaatacaaaaaaaattatccaggcgtggtggtgggcgcctgtagtcccagctactcaagaggctgaggcaggagaatggcatgaacccaggaggcatagcttgcagtgagctgagatcgcaccactgcactccagccagggtgacagagcgagactctgtcaaaaaaaaaaaaaaaaagtttttaattttcatgaagtccagtttatcaatttttttcttttgttgcctatttgttgttataaccaagacatgactgtgaaattaaatgtcattaagcttttttccctatgttttcttctcagagttttatacttttcactcttacatttaggtctttgatccattttaggttaatttgcatatatggtatcaggcaaagattcaacttgttcttgtgcatggatattcagctttccctatatcatttgttgaaaagactgtcctttccccattaaatggtcttggcaccgttatcaaaaatcatttggccatatatgcaagcatttctttctgggctctatattctattgctttggtttcaatatcttcctttatgccaataccacactgtattgattactgtggctttatagcaaatgctgaaatcaggaagtgtgagtcctccagcttcattctttattttccaggttgtttggctatttagagtcctgagattccatatgaatttcaggatatgtttttctatttctgcaaaaaatgtcactgggactctggtacaaattgcgttgaacctgcagctcactttgagtggtattgtcctcctagcaatattgagacttcccatccatgaaaaaaaaatgtctttccatctattgatgttgtctttaatttccttcagcagtgttttatagttttcagggtacaatcctttcacctccttggttaagcttatttctaactattttatactattttatgttaatgtgaattggaaattttttcttaatttccttttagattgttcattgttagtgtgtagaagtacaactgatgtttgcgtgttgattttgtatcctgcaacatcactgaatttatttattaactctaacaagttttttaatcttcagggttttctacagagaagtccaagttatctgaaaacacagatcattttacttctttccaatttggatgtctttttttttcttgcctaatttctctggctaggacttctaatactgtgtcgaatagacgtggcaaaagcaggcattcttgtcttgttcctggtcttacagggaaagctttcagtctttctccattgagtatcatgttagcattgggcttttcacacattgcctttattatgctgaggtggtttccttccattcataattagagtgtttttgttgtgaaagaatggtgaattttgtcaaatgcttttattggttctatctaattataggcctattaaatttttttgtgtttccaggaatttgtccatttcatctaggttattcaacagtttgttggcatacaattattcatagcattcttgtagtccttaatatttctgtagaatttgtagcattggtagcaatatctccattttctttttttttttcttttttttttttaagagacagggtctcactctgtagcccagcacaagctagagtgcagtggtgccatcatagcttactgcagcctcaacctccaaggctcaagtgatcttctgccccagcctcttgagaagctgggactacagacatgtgacaccaagcctggatagttttttaaagaaattttgtagacactgtgtctgcctatgttgcccaggctggtcttgacctcctgacctcaagtaatcctcttgcttgagtctcccaatgtgctgggattaaatgtgtgagccgctatacctccattttcatttctgattttagtaatttgaatcttctctcttttttcttagtcaatctaataaatgattgtcaattttgttgatcttttttgaagaaccaacttttggtttcattgattccttctattgtttttcaattttccattttatttatttaaactctaatccttattatttccttcatgtactatctgtggtttgaggtggttctttttctgtatcctgaagttgtaaagttaggttgttgatttgagatctctctttatatttaatgtatttaccattaaatttctcacacaagattcttaacttctctgagccttcaattcttcaactgaaaattgtaataattctcatcaccaggaaatggaggaaaaatgaaaattgcaataagaatgactgtttaacagtattgttttaaagatttaatgtaatattcgattaagctttcagcaaaatgctacacacagagggaaacttcataaatattagctgctattatcactactgttattattagcttgaagttaggcagttctagagccaaatcctagatccacttctcactaattatatgactttggataagttttttcaccactccaagtctctgtcatttcatctgtaagatggaaatcatgcctacccaacagggttattgtatggatcaaatgagatgccagaaaagcatttacagtagctaacatagcattaatcatcagcctgagttgactagtgagagccaagccccaaatgaaaacccactaggacatggttactggctaaaaatgggggagagaaaaaaaagttaagtgcaaagaatcaagcctggtatgttagttttcatccactgagattcagccaagatggaattagaggtgcaagataatttaccggggggaaccaccatgaggaaaagtggagtagaagtgggaggagcctgagagagccctcagaccacgatgcagatctgattcctgagaaggagaaagaggagagagttttagatagtgatgcagttctcagagtttccacaaggctggtggggcgtcctcaagcccctcacccatgagagagaagcagagtcccccagaactgggcttttcattcccctggtgggagcccatgagaagcgagttctctgtgcaacggacttagtaaatacagaatgcactagcctgggccttctgccaatcaagtccctgccacagagacccaacagacttatttatgcctaccacaactgagacactgagaaaaagatgcaaccatgaaaagatagaaagttctaatgacacgcaaaaatagcaatcagactttctcaaatttcaaagccttcagaaatagctgagtgcagacaggccagggtggaattgacagaagactgatcaccaactagcaacacagtgagagagaaaaaattgcaactttcccacaaaactaatgcattccttgaagcaacaagtagagactgcttcatgctgagagctggaacctggggcaccccactgtaaaataacatcacattcattccttctcttttctttccatgacggacgattcagcatctggaacttctcctggtctctcagctggggccactgtcggcatcatgattggagtgctggttggggttgctctgatatagcagccctggtgtagtttcttcatttcaggaagactggtaggtataatggcctttcctcttgttctgtttcctgcagtgctgactgccatgcttgggagagggaagggatttcttcacctgtatctgggactggatctcttcctcctacccccaagctcctgcttctcagcactaattcctgcaggtctcttcttccctggtcttcatgctccctgtacgccactgtctcttagatataattatccccaccctctgctcatttgtttcccagattcaatacattgtcaaagcctcttggtccttttttaacatctcacacttgtgtcattctctccattcccataaacctcaacaactgctcaaagtcctgcttgaccccttgttgccagtctttgaaatctttcttgcatatgactgcctcattaccttcctaaaatctagttcactcgcctactcaagaagacacaggggcctactgtggtgtattagataagttcacatttcttctctttactaatcttttttacttcctttaccaccactcccttatataattccatcatcctaatagatctgtttccctacacatccctgcctctccaccccacatgtacacagaattcttagttccggtgttacacctaaaaacatgtcaaacagggtgacctccttccactgtctgcactgtggagttacccacacccttaatcacaagcaacttctgacctcatgaagaacaaagactgtagcattaacctgtgagtcttaagctcaggacacaactgtgcctgtgactgagaaccttttcctgataaccaattcatatgttcataacagatacagaaatgaagaaggcaaggtccttaattctataacaggagacaaaacctgaaaaataatcataatgccaaaatagaaaggagtgaacatcacaagaaattagagaaatctgacggaaaatatagctacacattggaatcactcagaaacattttataaaatggatacttaagtcccaccgataaattccgatttactggtctggagtgggacccaggcattcgtaatttttaagcctccccagatgctactaatgtgtagccaggatggagaaaccctgttctaaataggtaggacttggggctaaacccatgactttcagctaggaggattagaattgcccatggagtttttctggctgggcacggtggctcacgcctataatcccagcactttgggaggccaaggcggacggatcaggagttcaagaccagcctgaccaacatggtgaaaccccctctctactaaaaatacaaaaaaatcagctgggcatggtggcacgtgcctgtaattccagctactcagaaggctgaggcaggagaatcgcttgaacccgggaggtggagattgcagtgagccgagatcgtgccactgcactccagcctgggcgacagagcaagactccgtctcaaaaaaaaaaaaaaaaaaagaattgcctgtggagtttttcaacatacgtaagcctatactttgttggccctgttcattaatgggctccaccaggaaattaggaatctagttgagaaacagaagctgaatggaaaggccaccttatttgatatgttaaattatatgggaagcactgtcaaatcattagtgatgttaaaccttctctaagttatatttatgagtatgttattgatgtattccaaaagttatataagaaattctagaaatctaattggttatcagccataatgtcatatgccacagaagtaactaaatttctatgtgagttgtgttcttattataataaattatcatcagatttttaactgtactcattttaaatctttgtcattcacagacagttgttttgcttcttccttaaagcatttgcaacagctacagtctaaaattgcttctttaccaaggatatttacagaaaagactctgaccagagatcgagaccatcctagccaacatcgtgaaaccccatctctactaaaaatacaaaaatgagctgggcttggtggcgcacacctgtagtcccagttactcgggaggctgaggcaggagaatcgcttgaacccgggaggtggagattgcagtgagcccagatcgcaccactgcactccagtctggcaacagagcaagactccatctcaaaaagaaaagaaaagaagactctgacctgtactcttgaatacaagtttctgataccactgcactgtctgagaatttccaaaactttaatgaactaactgacagcttcatgaaactgtccaccaagatcaagcagagaaaataattaatttcatgggactaaatgaactaatgaggataatattttcataattttttatttgaaattttgctgattctttaaatgtcttgtttcccagatttcaggaaactttttttcttttaagctatccacagcttacagcaatttgataaaatatacttttgtgaacaaaaattgagacatttacattttctccctatgtggtcgctccagacttgggaaactattcatgaatatttatattgtatggtaatatagttattgcacaagttcaataaaaatctgctctttgtatgacagaatacatttgaaaacattggttatattaccaagactttgactagaatgtcgtatttgaggatataaacccataggtaataaacccacaggtactacaaacaaagtctgaagtcagccttggtttggcttcctagtgtcaattaaacttctaaaagtttaatctgagattccttataaaaacttccagcaaagcaactttaaaaaagtctgtgtgggccgggcgcggtggctcacgcctgtaatcccagcactttgatccgccgaggcgggcggatcacgaggtcaggagatccagaccatcctggctaacacagtgaaaccccgtctctactaaaaatacaaaaaaagttagccgggcgtggtggtgggggcctgtagtcccagctactcaggaggctgaggcaggagaacggcatgaacccgggaggcagggcttgcagtgagccaagatcatgccgctgcactccagcctgggagacaaagtgagactccgtcaaaaaaaaaaaaaagtctatgtggtcagtcactactcttgctgcagttatgaaaagaatgaggccaagtctgatgaaaataaacttattttgaaaacaaatttgtcttattgggattatctttggtagaaatagagatgcctatgaagagaaattatgttgaaaaaaaactatagtacacctgttatgagactgtcactttgtacattgttgagtttttattatccacctgtagactagagtggaccatgaattcttccactttcttcaatcccattttctaccatggaatcactaagagcaaagtctgctctgttcctgaagctctataagctacagatggataactcaatgtaaatttcatgggaaaacactcatgcctaaggtgtgggccactcagagctcaccagtatgttcaacactataactagagacactgaaactgcaaaccaggacaagaaattgacaacttcacgctgtagacagctttccccaagatgtcagaacaagacttcctaccatgatgaggctcctacccctcttaatttgtcctagctcatgcctgcctctttcacttggcaggataatgttgtaattagaatttcacaggaagtatcttctgagggtagcttaacagagtatcagatctatgatatcactaccaaatttttacataagagatcctttagtccactcaacggctgacattagcagcatctttaatacaactgtttgttcaaaggcaaggtggtcccttttaaagttacacttctagactcacctgttctcactccctgttttaatgtaacccagccatgagatgccagataatagaattgctacctactagctgaacaggaaagaacctgtgctgattctgacacttcttgttgcacatagataaatacaatgggtattatagagactcagttgcagaaattaacaaacatgctgcttggttaaaatgggtagactcatctggctcattctttattccattttagttggtttgcatcttgcctaaggtgcatactccaaactcttggtattattctcctgatagtcacactagtagtctccctggtgtgctataatctctaaaagctttaaatgtttgcatgcagctatccatcgaatgtcaaatggtctctctttggctggaatgacaaaactcaaaggaatgtgtgatcaggaggacatcataacctatgaatgatggaagcccaaaatgatggtagctgagagtaatgtcagtgctttcagttttggtcacactctcacctaagtgagagcatagagactccaaatagggccactgatgctaaatgttacatactccaactgaaattttaagaaagcagatagatcccaaaacagaccaatttaaaaaaataaaataaattaaaaaataaaaaggccaggcatggtggctaacgcctataatcccagcactttaggagggtgaggcaggcggatcacgaggtcaggcgtttgagaccagcctgaccaacatgatgaaaccccatctctactaaaaatacaaaaattagctgggtgtggtggcacatgccctgtaatcccagctactcaggaggctgaggcaggagaatcacttgaacttgggaggtgaaggttgcagtgagctgagattgcaccactgcactacaccctggatgacagagtgagactccacctcaaaaaaaaaaaaaaaagaaaagaaattccaatctacttaaattaacacaataaggaggtcccctttgctttaatttttataaaaaagtaacctgaattaaactgatgttaaccaatatatttatttctactgctctcttttcttgttcaaatttgacaaaacccactgttctgttattgtatggccaaaggggagttatcactgtatttgtaaagtgggacctgccccaaattacaaatcccaaataaaagccaattagatttataaataaagctgttgtaatcgtgtctcttgatacgagttcacagccagcgatggccagtggagtctctcaggctgcgtcattctcaccctgaccctcctgccttcctctttcacttacaaggacccttctgattacactgagcccacccagattatccagaataacctcccatctcaagattcttaacctcatcacatctggaaagccttttgccaaataaaagtgttatgcactggctccagggattaggatgtggacatttttaggaggccattattctgcccaacacaggtaccttttataaacttcacccacaacaaaaatttgctttgcctgtcttctgtgtctcacttttctgtctgtgcacaaagtttaaggtgaaacacaccagctctgctgtgaactggctggatgaccctggaccactcacttcacctccctcagcctcttctcatctgaagcacaagggtgattcttactgcatcagaaaatttacatgaaagggtaaattaagacgtgtaaggcattagacacagagcctggtacctgatgagccctcggtaaacattcctttcagtcctttcctttcaccatcctatttctgtcaccctcatccatctgctccttcatctcctttctcttcagtgacttactcagtctaagctgccagttagcaaagaagccacacttcccattctctcatgattctgctggaatgttcttgtgataaagtctgttatccacacgagacagcccacattatttatatggagaggtctagttaaaacaagtcctttttatgttcacgtaaaacctatacatgtttcctcttaatttacacataccagtcccaattctgccccgttaatttatacatgcactttcttgttttcactcttcttcagtatttctctttacactttataaatttggatagtacagagacaaaaataatgagctgggccaaaagagaggattcctttagcaagatgaatgctttcctttaaaaagatgaatgctttcttttgccataatgaatgctaatttgcaaggcactcctgaaacctgttcctaggattggcttttagagaaatcatttgactctggctgggcgcggtggctcacgcctgtaatcccagtactttgggaggctgaggtgggcggatcatgaggtcaggagatcgagaccatcctggctaacacagtgaaaccccgtctctactaaaaatacaaaaaattagccaggcatggtggtgggcgcctgtagtcccagctactcaggaggctggggcaggagaatggcgtgaacccaggagacggagcttgcagtgagccgagatcgctccactgcactccagcctgggcgacagaacgagactccatctcaaaaaacaaaaaaagaagaagaaaaatcatttggctctaggacacattctagaccccaggaggtaataacagtgacagaagccacatccactcttagtatgcctgctgcattttcacagaatgttgtgcatgaattactgttccccaatccttccactcctggaggttaagcctcccccttcaacatcttcatctccagctggcctgccaggactatggctgggaaatacctccccaccttccatgcccagggtggcacctttgcccattcccataactataatagctcacactgatgcagcactcactgtgcaccagcactatcctaagagctttctagctagctacagtcctcgccaaaaaatcctgagtgttatcatccccatttttacagattaaaaaaaaactgaggcagagatgtgaagtaatgtacccagtgtcacccaactcatttaacctcatcctccactttatctgggaagaggacaccctaagatttccaagatgtcctgaataacatccaccttccagaatggtttttgccccctctactctcaggatttgacaaacagccagtatttcgttttctgtcttacccttcacttatgcacctgttctctaacgccacactcacaactgcacagcccggaataaaagctggcttttacggacctcaatctctttgggaaaaaaacagggccaggttcccagtcatcataaaaagtcatttgtactctattgtcaactatttgcacagccattccctggccataaatgatgtatagtaccaacaataagtgtaatgagaagaaagcaggaaaagcatgagttcctggaatggtcacaaagaggagaagatttcaaatccagaaacagtcataaaacacacccagagtgtgaggcctctgagcaatgacagccccacctgcctctttccatggctggtggcctctgacttccttctcaacctgccccacccggccttgctttattaaaccgatactaatagcttggaattggggccagaccagtgcacacagcactgagtggtggggtggaggagctgaaaagggagaagagtgtttgacttatgaagacctgactcacttaggtacacatcacctgggcgggaaatggtttagtgaagggctgtgcagaactcatggtgtttatccaaaatgagtgactgaggcaagtgtctaaattaattgtttattgagccagaccttgagggtacaccctaggaaaacacaagtcacagaaaacctctgtggcttgtgttctctctgaagaggttttcaggaggccttaaaggggggaaggcaggtaggaagaggcgggtaggtggaagaatgattgttcttgtctttgttctgtgcctagaaagataagcattatcagcctgaaatcctaaggactaagactaaagccttaggaaccagacttagatttcagaactgaagatacaatcgacatgtccttgttatatggggggatatacatcttaaaaattttaaggccagcaaagaacaatttgtgagggcagtcatccagaaatacctaaggccttttgctttcctatagaggtctgtttaatgtacaatgttttgacacaaggttttatagtaacagcgatccatctggggaaatgatgatgatgttgcatgactcagtctcaaagcttaactttccctttgacctaaagagagtcctgaagtttttctttccctttacatttacctgctacctgacctgctattctctctctctctctctctcttttttttttttgaggcggggtctcactgtcacccaggccggagtgcagtggtgtgatcatggttcactgcaacctccacgtcccaggctcaagcaatcctcctacctcagcctcccaagtagtatctgggactacaggcccatcccaccacactcaactaatttgtgtgtgtgtgtgtgtgtgtgtgtgtgtgtgtgtgtgtatctttttgtagagacagggtttcaccatgttgcccagtctggtttcaaactcctgagctcaagtgatccacccactgcggcctcccaaagtgctaggattacaggcatgagtcgctgcacctggccaacccctgaaattcctcaaaatctttcagagaaagcattatagaagatacgagtttgtgattgtatgtttcatctgatcctacatcaccaggaaagctcattcctaggaagttgtgtctcatggagaagggagtgaagttgcatcagaaaaggaccgaagccaagttacaggaacaaaaggaaagtaattgtggagccctatttgggctacacagctgcctcttcaattaaagcaattctttgagcaatcatcaccctaaccgtttcagttgtatgttggttcgatcgtaatatctggagcagtctatggactagtttttctagagcctctgaagctccttgagattgcagtggcagatttctctggattgtagtttgaattagatgttcaagtgaaccttttgagtagccatacatcagcaggcacaaaggttgttgttatataagttgtaatttctcctgaaattcacttaagttgtctagcttcaggttgcagggctttaggaaaaagcacagttttaatttctaatgattccaagtcagaaaaacagaagaaaaatttgaaagtgttattttcaagacttgtagccaggaaagaattcaggattcagtacaaattgtaaggaaataacaaaactcaaaaacaatgagcaacaccagaatttaataacagctgtactgtagtttcttctgaaacataatgttttctgtctccagttctccatttttacaaaagccaaattatagtaggacccaaattatttgcaaaataagttttagtcttatacttggcctgaaattttcattttggaaagtttgtcaaatatcaaaggtctaagacacttgttcaaaattggtcataggtcactataaaatcatagttattaatttagccaaagtgataattcaaaaattttaagagggaaaaatcttcatttttttcatttatgtatttatttatttatttattgagtcagggtctcgctctgtcacccaggctggagtgcagtggcaccatcatacctcactgcagccttgaccttcagggcttatgcaattctcccaacccagccacctgagtatacgggactacaggtgcatgccaccgcaccttgctaattttgttattgttgttgttttttgtagagacagagtctctatttgtggcccaggctgatcttaaagtcaggtgggaactgaacaatgagaacacttggacacagggtggggaacatcatacaccggagcctgtcatggggtgggggtaggagggagggatagcattaggagatatacctaatgtaaatgacaagttaacgggcgcagcacaacaacatggcacgtgtatacatatgtaacaaacctgcatgttgtgcacatgtaccctagaacttaaagtataatttttaaaaaagggaaaaaaaagatgccacctgtgttaattagcttaggaaaaaaatagacaccaaggtaacacaaaatgatagatatttaccttaggattttatgaggagatttattttctttagataggtcacttttgatttagggtgtgttttccaactggaccgctgagctcaagatggagcccagcagggccaacaaattatttgcagtttgtggggcctaataatttaaatatgggaaaagtgggcacagttggaaagcagagcatttagatctttaaacattaaggattccactgaaccccaggttccccaaaaaaaggaaaatgcaaaaaggaccatgctgtacaacccttccacagttgtactttgctacaaaggcatttttctaattgtttaaaccgtgtctttcttatcaaaacatgcaaagaaatgagtagccttctgaagtaataattatttattgtaaccactgtcagtcatctccaaaactgtagctctcacccctgacccagcagccatcacacacacaaggccgagtatttttacagtacgatgcaatctctgatgcctccagaagccaaaaacatcagataacacaacagaaaagagcagagtgttagacctgagagaaatctggtcacttaaaattcctgaggctccatgaggaaaaacagactttttttaaaaaaaaaaatattttaggtaccttgttatcagattttagctgggacaaacaactgctatttctggtttttgaattttttttttaaccaaagttgccctcccaattaaaactaataaggcttaaccagggttgtgacttaaccaaggatgtacaaggcatatccaaatagatgaatgagccaggcacagtggctcacgcctgtaatcccagcactttgggaggccgaggctggcagatcacaaggtcaggagatcgagaccatcctgactaacatggtgaaaccctgtctctaccaaaaatacaaaaaattagccgggagtggtggtgggcgcctgtagccccagctactcgggaggctgagccaggagaatggcatgaacccgggaggcagagcttgcagtgagccgagatcttgccactgcactccagcctgggcgacagagcgagactccgcctcaaaaaaaaagaaaaaaaatgaatgagtactcccaaaaaaatagtccaaaatcacagaaacataaaaccaaaagggactagtttcctgactagaattaaacccaggctgcagtattaaagcacagaattttaactattagaagagaaggtggagtgccttttattcgtattttctcaggagatctatagcaagcagtttgagcttacaaaagattttaactttgttttaggtcaaatttttgtaatttactcaagagaatttttaaagctagctacaacactatgatgcgtctttttcttttaattttatctttccatcacctatttaaaataaaagatctccaaaatctttttttaatgtaggagtccaatttaaaggatccatcttctggccattagtaattagaatttccaatggtgtactgatcccaataatgaatcaacccagcagtttcttcagtgatgaagcaatcccaaagatctgtcccctcaacaaaataaaatattcactcccaggaatagaacaggacagcaaaagacttttgtttccatagcactaaccaggcaacaacggttggaacaacaaaaaccccttatagatgggacttcttataacaaatcctcctgggagttcaactcatttggaacaaacaaaacaaaacaaaaaaatctcaggtcccagtcattctcaggctgatcacctgatatgactcaaaaatcacacctcccagatggtggggaccaagagcaagtgctcccacttggtcacaaatgaagccttcaaggacataaaacaagatgagagggaattttatttggtacccttctttataaacaacacagaatgaaagagacagaggaaaagactatttctggaaggaaagggattaaacaatataaatattcatatggaaaaatgcaccaaatactacaccacaatctctacacccaggctagtcatacacaaatcttctcccattaaccaaaattttgcagagaaaactgatttttcctgtctgcttgaccagattgcacagggagaagccaggagcctcgctgataataaactctacccttttggtggttgatcattttcctggattcctgcatggccaaaaacaggttatgggggtaaatcaggtttaagtagcaagacaggttattcgagggagaaaggaggaagtctggctaacgaagatggtcttgttatatagatgaaacctcacaggtagcagccctcagagagaacaaatggtaaatatttcattcaggtctttaaggtataaggctcagttcatttttcccagatccagacaaaagaaagcctgtctgtattaatggggattctctacagatgccaatttttcacatgaaagacagctttgcaggccacttctgcctgctggccctctgacagacatctcaaaatatgtcaaaaaatatatttttgggtacaatattcttatttcgttcaactgacaggtgattcccagaggtagaacttgatgttctgcagttgcaggggttttagccaattttgaggccagctcaccataatgtagagctcctgctggatttgaccaagttggaaggtgttttggacactagacagggccaagagttggacaaactcaaaggaagaatgacaaaaaccaaaaacacaaaaagtgattgcactttacatattacatattgttgaacactgtaagcatgaggagagattaaagcaaactagcaataaactttgacctgcagctaccacattttaaaacaaaaccccaacccagctctttatctcagaggggaccaagctgaaggctgctctccattgtcacaggagaaggcaactcaccttccttataggaagtgagcaaagctgcatgagtagaggagttccatggcaaaacaaaactcggatctcaaacaaaaaattgtggggagcagggacctcaagagggagtaggatccagtccttggaaagtcacacatttggtcagagctaaagctcgatagttggtactgagcataaacaggagaatcgctgcaggcctaaggggctaagctccactcagaggatcccttcatggtcaccaaaatgttaaccaaaatgattgactgaggcaagcaagtgtcagtccattgaggtttactgagccagagcttgagggtgcaccctggaaaaacataagtcatagaaaccatctgtggcttgtgttgtctttgaagaggttttcaggaggcctggtatttatacttctccttaaaagggggaaggcacgtaggaagatacaagtagaggaaagaatgatttgtctcatcttgtctttcttcttggatagataagccttatcagtgtgaaatcttagattgcaaacctaaagttagtattgacatgtccttgttttgtggaaggatatacatcttgaaaggtttcaaggccagcaaagaacaatttgtgaaggcagtcatctagagatgcctgaggccttttcaccttcttgtgggaggtctggctataacgtacaatgctttgacacaaggttgtgtagtaacagttgttcatctggagaaaagatggtggcattatgtgactcagtcttcagactgaactatccctttggtgtaatgagtgtgacatgagatttttattttcccttacataattttaggagttgtacttccttgatgctgtctgactgaggtcaaaaggatgggtgtggaaggcatcacacctttctcccatttagaaatccattgtcccttccttctcccttattgggttacattcctctgtccatagatcacgtatttactgagttgttttccacggggaaaaaaatctcaattgaactctttaaagctccaagcatttaattcagttcaagagtgtctctcattttaatgatgaccaggcacaaatatttttaaaacgctctccagaaaattgtgataagagcctctgcacaacccacagtagctttggagagcactgagctacaaaagtgatggggaaggaacctgctacatgctgggacctttatatttccaccttatctaatgtccccaatgatgttttaagtaggcactattatcaccctatcccaagacatcaattaacttgtcctttatctcagaattggtcaaaggtggaaccaggattccgactcacatatttctgaatctaaaggtcttgtttcactgcagagcgattgagcgtacatgaactcaaagaaagacaggatgactgattctaacagaaataaccacacaggcttcaatgaagagtcagggtctgaaacgggccttaggacaaagaacagctcaggaggctgagaagacagttgaaggtattgcgggaaggtgtgaaagaattagaataagttcagacatgaaaacataaaatgtgggtcaagtctttctacacagaccaagggagtagactggggctgtgttatgggggctttgaatggcagcctaaggaattggaacttcatcctatggatgataggagtcattggaaagctttgagaaggtcagagacatgacaaacagcatttccaggaagattactctgacagtgtaaccaaaaagcagattagttgcaggctgcatgtagagtcccactaaccaaagcaaggtctgggccgggcgcggtggctcacgcctgtaatcccagcactttgggaggccgaggcgggtggatcacgaggtcaggagatcgagaccatcctggctaacacggtaaaaccccatctctactaaaaaatacaaaaaattagccaggagtggtggcgggcgcctgtcgtcccagctactcgggaggctgaggcgggagaatggcgtgaatccgggagacggagcttgcagtgagccgagatcgtgccactgcactccagcctgggcgacagagcaagactccgtctcaaaaaaaaaaaaaaaaaaaaagcaagatctgatacaaaaaagtaactttattccaaagctagctttgaggaaggggcacaaagcattctgcctttaaatttgctgcttcgcctttggagcaaaaagcaggtatttttataagttaagagaggaaatgagcgagaatgaccaacaaatgagcaaaagagaaaatgagcagtagataactgtccggtcctcctgctactgggcaggtgtctcctgggcagcagagttggcactttcctggacagaagtaagttataaaaacagtcacctggatatgcttctgacgcaccctccgaaagtgtgtgagttccgaggtggcccaggatggaagttctaaggcaatcccctaaagatgaaaggtccatggcaggtatgctatggtctgctgatcaactgtcaactcttgaggagagacccgtcatggagcacctatctagaagaacttgccccttagggagtgtctggtgatgggggaggtgaaaggttatatatacatttctgaaggactaagtaggaaacggggtgccggaaaaatgagaaaagagagggaaataattaaaccatctctagaaaaatagaggtactcacttccagttttccactgccaagctttattttatctttatgagatatgggtggcacatatgttctgcctgctttttgctgaaagggggcatagtcattggacagcagaatggaaccaatttacttggagttaaaaatatttatgagtacccaggcttatagatgatataggttggagcattatgatgtgaggtctagaaggtctcttggaaagcctgccttgtatttttatatagaggatgtaaaagcaggaagctccaaaacagaggtatattcctatccctgcaagcagggccaatattacaagcagcttttgccactaggatggttctgacccaaatcaggacactacccattggtgtagcaacaatgtggggctatgagaaataaaataattatttctgttaaaataattttaaaaattaggccacctctagaaaaataggggtactcggttacaacagtcttaggcaagataacaagtggttctgaactctggcaacttaatagaattatctggaagctttcatctttttttttttcttttttttaacttctcattttgaaataatttcagactttcaaaaatgttccaaaaatagagtccccatatacttttcactcaacttccccaaatattgttttagataaccacagtgcaaacattaaaatcaataaatgatcactgacattgtacagtaaataaattgcagaccttattcaaatcccttttatcttcccagtgatgtcctctttctagaccaggatccaatccaggatcacacattgcatctcatttttctgtcctctcagtctcccttaatctgggacagttcctcagaatttcttttgccttcatgaccttaacatttatggagagtattggagttattttgtagcatggccctcagtttgggcttttctaatattttctcctgattaaactcagattatgcactttaggcaagaatagcatagatatgatgctgcgccttctccatgcattgtattaagatgccctaagatgcagatatctctgattactggagatgttaactttgagcactgggctaaagttcctccactgtaaaatggctattttctttggaagcatttttaagtgaccaataccccaggccacactatggaccaatcaaatcagacactcctgggaaaaggcacaggcattggtaggttttaaatgccctacagctgactgtaaccagcatccaggattggaaacccacagcttagacagtgaagattagaatcctggaaatcagtcaggaagccattctttgggcctaacatccagttccagacacaacatttggcatgggcccatggtaggggaatggaaggccaaaaatctcctgattgggaaaatgatgggtgagtagactgctgtccaataaaaatagaaggcagggccaggtgtggtggctcatgactgtaatcccagcactttgagagatcaaggcagccagataacttgagctcaggcattcaagaccagcctgggcaacatggtgaaatcccatttctacaaaaaaaaataatagccaggcataggtaatatgtgtctgtacttccagttatttgggaggctggggtgggaagattgctagggtccaggaggttgaggctgcagtgagccatgattgcaccactgtgctccagcctgggcaacagagcaagaacctgtctcaaaaaaaaaaaagagagagagagagagagagagaaggcaaaatgctaagtaaggtgtccagcccttctggagtattttctctccagactatagagaaacctgtattgtagagaaagcacacaccataaaatttaactatcataagcctgatgtgaactcctaattgccactaagaagaaggaaattataaatcatgtgatagaaatatatgaccacatatgcagagatgcacacttccggatacagttgaatgaaaaattcacagaatccacgtcagaggtacaccaccccgccctccccacttggtcctttgtccttaatctcttctgaagtaagagaacgaagactgttgtaaatttcacaaaatagggaagtgtacaaatctcctgtcacctggctgtttaagcaacaggacactgtgctcaacttccctagagttattatcttgggttctccataaaggaatgccatcaatcctctcttcagagggaccatctaataacatgcaaaaggaaatgccaatttcaccaaaacccagaggcaggaaggaccctgacaggaacaatccctaaggtattcacatgcctgccagggtctggtgcagctggtgcaggaggaactgctgctggcaatagctggaaaaaaaaaaaagggacggcagctctaacactcagggggtagtaagaaaggagctcactcaattcaccttcagttctcacacagccaatacccttccagcctccctgtggggcctcactgggaggactggcacataattaaatgccaatacatgggtaaaataatttacagaagggtgggatcaactgggtcagaaaaggttgaagatttcacaaaacgggaaggatttgggttaggccccgaaagactcagccttaagaaagcagacacaaagagaaacagaagcccaagaaaagcatctagccttcctggccaattttctattcagacttcagagagacctttatcgtagtgaaagcaaatgtcatataaatttactatcctaagcctgacatgagctcctaattgccacagatgggacggaaattatgaatcgtgtgatagaaatacacaacgcacgcaaagatacacactttgcaccactctggatgcacaaagatgcacacaggccccactggagatgctagttttgaagaaggtcccaggaagaagagtgggtttgcagatgttattttatttgctcttctcaaacaccatatggggatatttcacaaggaggattctcgtcctcagaaaggggaagtaacttgccaaggttgttggtggatgtgggattagaacctcagtgagtctaacaccggagcccatgccaccaccactaccaccgagagccctgaacagggtatgtgtagggaacaggtaggagcagagagagttaaagcagaaagaaaccattttaaaacagggaagttaggtaagcttgctaaatggggatcatatgttgcagaggcatgaacactagacagtcgtgtgaacttgatcttctgattacagaaaagacaagacaaaagagggtgtgaaaatggggttctgggttcctaagctaaagagatgccaccaacaacagtgaaggagccatgagatgtgtggagaaagaactggatggagaagctgaagccctgagtttaaatgcaaaaagtcataaagtaagggcatggctgtggagggcaagttatattctctctctgcagtttggtatctcttcatctataaatcacatggagtgagaattaatgtctaaatgaccctcaacccttgctactcaaagtgtggcccaccaaccagcagcaacaacatgtccaaaagctcctcagaaatgcagaatctcagaccccaccagaaggatcagaatccgtattttaacaagaacttggggtgacctgtgagcacattaaagattgtgaagcagttctccgaaatgtcttccagttctaaaatgcagtgatttcacactcatctgaactttgtcacctcacaggagaaagaaggaaaatggcatttacattttacctcgttcgtgaccttttcttaatcctaacagcctcttagactcgcccgcatctgggtagaggttttagaaaacaccagagaggcagggctgccaccttgtgactatcatcaggaaacgcacttaactcttaaccagtctcaccagtcaaggacgggacggggctggagcagagagggtatacgggatgaactccaagtcacagatgagataagggagttataaccacccacaaaggctggaagtaactgtcagagggggctcagcctgcatcataaagcaatgtccccttgcaaaggacagtttttataatacttactatgtgatatcagtaggaaatggttccaggtcaagctctgcccttgtaaccttaaaacttactctaacaggtattttcaacatcagcctcagcctgaactctgccagtaaacttgtaactttccaaggaaacttactctactgtaacagttctttttcatccggagacaaaatgtatctgattcgcagtcaccgatcctcacactactctctgtaggctgaataagtctaacagcttttcatacaactgaccttcaaatattggttaagaaaaaaacaaaaccaccatgtgctgcccataccaccattccttggccgtttcccatgtggggtcacctgaagccccacaccctctgatcacgttccaatgggcaagtgaagtgcagtaacaacaacagacactctgaatcctaggagtgtccccagagcagcagagccacaggacccccgtccccgtcctggcgcctcaccgctacctagaagccaaatgccacatcagctgatctggggacgctgacttctcctgcttatgccactgctcagtcatcccacacctgtgcaggtgtctactttttattcagttttatttgtaagaaatatttatctgaggctgggcacagtggctcatgcctgtaatcccagcactttgggaggctgaagcaggtggatcacaaggttaagagatcaagaccatcctggccaacatggtgaaaccccatctttactaaaaatacaaaaattagctgggcttggtggcgtgcgcctgtagtcccagctacttcggaggctgaggcaggagaatcacttgaaccagggaggcagaagttgcagtgagccgagatcgcgccactgcactccagccaggcgacagagcaagactccatcaaaagagaaagataagagaggaagaaaggaaggaaggaaggaaggaaggaaggaaggaaggaaggaaggaaggaagaaagaaagaaagaaagaaagaaagaaagaaagaaagaaagaaagaaagagagaaagggagaaagaaagagagagaggaagggagggaaggaggaaggaaggaaggaaggaaggaaggaaggaaggaaggaaggaaggaaggaaggaaggaaggaaaagattgatttataggagcctgctgtgtactgtcactggagagacaaaggtgaatcacacccggtccctggcttgcagagctccaggctatggacggaacccactcaaagtcagaccattactattcagtgagaaacaccgtgacaggcatcagaaaagggttttctgacccatctcaccaatgccctgtgaaaaatctgctgttggttttctgggctcagtttttctcatttcaagttcagaatgaaaaagagaatgtaaatgtccctgatggtcctttgtgcggtcacagctgtacccggcatgtcctcccagttaatccagggtgctcagggctcccacttcactctgagcgtcctctttcctatcggagctcaccacgtctgcacctgcagcagccaggtggctgcacactaatagaaaatccagcaagtcagaaaacttgatttactcctgtaaatttgaggccagtgaccttgtgacattgaactactcctataacttccctgcactttaatttccacgtctgtaaagtggggcaggtggattcggtcaccctaggtgcagctatatagtgagagctcctgagagacagcagcacatctgatcttctcgcatccaccatctagcaaataccaggcacacactagacgctcaaagcctcactgaatgtgtgtgtgaataaatgactatatgagagccatgtggatcatggacaaagtcaataaatatttttgaacatctaccaagtacactgtagaatagggaaataagtaacccaggcagggtggtgttttctcctaacttcccctgaccaccttcctgaaggtgggaaggactctgtacatcagggagactcttgacacaaataatgttcttgagatgcattgcaagaagtcatgttaacaagaggaaagtccatttgtcttgggggtgttttagtcaatggatctgaaggacccgaagccccctctgatgacacacagggtgcaacacccaccctaagttcatggaggggaaaccagatggagtgagttgacagggagcaggacctggaagaacagggggtaaagagactgaggcacccggagggaggtctgaggagttgctcccaacccctgcggtggcctcggtgtggactgatgcagaactcagcagcataagtaagtaaagtggccgcaccaggctctatgcatacatgggaccatttttcagtaagattttctttctgctaatgggcttcacttttgcccactttctaacacatcaggacaagttaataggttacaaaccatcgttccattcagcagtcatttatagaatactcccaaagtgccaggccctgtgtgagttcaggcaatacaaaaatgaacataaaagctcctgtcctctaagatccccatccaatgagctccagggagcacctctcctacaacacgcccctgctctgcacggccctcctctctgccctccaccaacccaaatcctcctccacctccagctcaagttccacccaaccaagtccctctcagtccccctgcactcctgccactttgagagatgactgcactcatatctctaggttttatgaagtggatgtcatctccctggttagacttgagcctcctgaaggcagagaccatttttagaattttccagaaaaaaagccacatcagtaatttgcatcagaacaagcttagactctgctcaagccttcaacttagacagagactccactgcctagcacagtccctggtccctgcagtgctttataaaccctgcagtagcaaagtccacaatcaactcgtgtgtcagtcaacaggctgggataagttgaaaatgcagacagagaagaacagtcaaacaaaaatcaaagggctttgactcatgccttgcctcttcccttttctcagggaaacaaagtcacaccccctgctctcactcctgcctggaggcttccagggagggctcccttgttagccttcccttcagcccccatgaatatcacccagcattcaagcccagcctctcctctccctttgagcacattgcctaaagtctcaaataaatgtcaagtttagtgagtgctgatattctatgcccctaatgtttacttcaagtattattacctttcttcttttgcccggggccatttccaaacaagggctggagccaggcgccccagcagctgggcaaacacacttcagggctccttccctcctgtggctcctgtttctcaaaccctctgggacctgcagctctgggggtctcttcccccaacccagttccctcccctttagaccagaacaactaagccatggccaccttcccgatggacacacaaggaggcctggtgtcacccactgctccaggggcggtgttctcggcaggggagctgcctcttgtcccggatcctgctctgctgccaccttatgtggctgcagaattggagggaattgtgaacagagagaggacagggcaacttcccaggcaacaacactactattgccaatattttgccaaggatgggagcaggagcacagagggaaaacagaccttgtcaacgtctcctccaccaacacataacacccactttcctgccaaatactcagatagagaaggtcactgaaagtacaagaaaattcaaatgagaaaaaagacttgaggaagaaaccatgaggcattggggtgtggggaggtgggaaggagtacaggagagaactggcatggctgccaagttgtcagtcaccttcttatgttcttaagaatgctgcatttcttttgtttgaccagtttcacttcccagattcccgtaaagcacatggtctaatctgttacctaacagcaggaaagcatgatctcacctgttcttgccctcaagtaggaacactgccctgggactatactgcagaccaccaggctgagccatccccagaggtcaggagcttccaaccgggaacctttcatacactcttcaagcaacgtacagctccaccgacagtcacaataaaaattctaatatcttccctcctcctgttgctgatgtccatggtctctagcagcctgaatccaggtaaataagactgtctatgaaggggaaaacggggggaggaaatggagcaaaacaggccacaggtgcatcaaaatgtagccctttcagctacagggattgggagcaagtgagcctttttcagtgccagtttcctcatttactgaaaggagcaaactgtacttacatctagtgttgtgagggttaaatgagatattgtatgtgaaagtgtctgcaactacagctggcagatatatacatatgtacatattggttcaacgaatatttgctcccatgccttcacccccaagccttttccagaagagtaatgcatttccccagggtcaaacttggtggcagtagtgggagggtattgaaggcaaccatatatttataaaagataaggaactctttgcttatattcttttttttttttttttaaagacaggatcttacgctgtcgcccaagcttggagtacaatggtgcaatcatagctcattacagctcaaactcctgggctcaagcagtcttcctgcctcagtcttccaagtaagtagggctaaaagtgtgcaccactctgcctgcctagtttttcctttttttttttttagagtcaaagtatcactatgtttctcagtcagatctcaaactttgcttgtattgtttatattctttagagtgcaccaagcatgacatactttaatgctattcaatggtagctaataaacggaagaaaatcctatcaccaggtagtgtccgtatttgaagctttagccacaccaagccctgctgcaacagtgcaccatttgggtagcagacctttggctaaggctttctaatctgctccagttttcactacaaccaaagtggccaagccctttgcaaagaaatcatgcagaagacagcttagccccatgtatatttccacttgggagcaccatctccccaagggccactttgaggtgaaacagctttgttacatactcagcgtcaacttggtcctaaaatcaggagatgttcagccttctccactccaatttccaatgttccttgctttgtagagagagcgctctggaagctgctgagccccatagccctggggcctaaaccaccattcaggaagggaaggtttttccatcactgtgacagacacccaggccagagtcctcagcctagactaaaaggtctagccccaacctccgtttccagtgcaaccccctccactcactaaaaattactctctctccacccaaactagactgtttgcccttccctgaacagggcttgtgttttcccaccagttcaactttgcagatacactcaactcaaaaaccatcttcccacaggccagacaagtgctcagctcctcccacacccagacaatcactctccatcctgaaagctggcttagccctactggactctctcttcttgcacttatctgctgccttatattgaagaccttcctgtgtctctcctgcctccacccactacccttagaggttgcagcctccttggcagcacagactggtgcactgtttccatatccctcatgctatccagctcagcactcagcaaccattagctaaccgcacgaatgcgtcctcaggtttctaaatcaaaccagggcttcagagcaggtctactgacaactgggctgaccgattccttgtagtgagggctgttctgtgcattgtgagatgttcagcagcatccacatgccctctctccactacatgccaatagcagccttccccctccctcaagcaccctcttccttcatgaaagcaaaaaatatttctagatattgccaaatgtctccttgagggaaaccacccctagtcgacaaccattgctttataccaatagttctccacctggcccacacatttacacttatctaggcatttaccctcagcctggaagtcaggggggcctagatccaaatcctggttctgtcactccctttgcaaccctggacaagtcgcttcattttttttctagcctttttatcgtcttaagatgaataaataccactgttcacacaggcttgttgtgaagattagatgaacctcagtgtaacctggaaagggttcaataaatggactgaatggaatttctaaagtcgctcctaaagcactagggtgaggaactggggaaagctcgctgcgccgccagggggcgccatcacaaaccacctcggtgggtggcgccgggctcgagctttgtttcccagccaagtagtttgtaatgcgggcctgactctgagctacttagtggctggaagaaataatagcccctccattcccaaaataaatctcaaaataaaatctaatcttattttatatccctttttttttttttttgagatggagttttgctctgttgcccaggctagagtgcattggcgcaatctcggctcgctgcaacctctgcctcctggattcaagctactctcctgcctcagcctccctagtagatggaactattggtccctgccaccacacccagctaattttcatgtttttaatagagacgtggttttgccgtgttggccaggctggtctcgaactcccgacctcaagtgatccgtccatctcggcctgccaaagtgccaaagcgtaaaccaccgccccgagtggctggcattgtttattatgtcgctgatattgtcccaaatttggccattgggagttccttctagttggtttctgtgacttttgacacaaccccatcatttttcaagcagttccttacttctggccccacagaatgtttacttctggccccacaaggctcctcttgtgctttcttgcccagccctggatcagctatttctccagggacccctggttcctttcatgggaaaatgatgtttacagaccatgggcacccatatgcccattgctagtaggtgccggtgcttctatgccctctagtggtcggagctgggaaataacacacccacactagtgtactgttacccacatttcacaaattaggtaaatgaggcacagaaaagttagacaacttgaccaacatcacagagaaaataggtagtagaactggaaaacaaaaataatgacagatgcacaagtcctaacaagcaaaagtaacttcttcacacatgcatgttagcagaaagccacaagcccaatattccagcatagacactctctttggaaaataaccagaattccacagcaataaacacaatgataaccatcacgtactcaacacccgcctggacactgggctcccacatattcccaacaactctgcaaggaggattttaccatcctccttttacaaatcagggaatcaaggatcatagaagccaagtgacttgtccaagtcaacatagttaagtgacagaaccattagctgagcccaggtctatatctggatataaattccatgcttatgccactatataagcatttcccaaaactgattttaggtgaaacataaataaacttttaagtttaactgtgtttattttaacgcatgacaggaaaaaaaattaagcacacatcaaatctctgatttcatggacaatattgcataagacaaaaatattttgtcttcagttcctggcctcaagccatcctctcacctcaacctcttgagtagctgagatcacaggtgtgagccaccaagccctgctaagacaaggatgttttgtaaactaaatttaattacaaaaaaagtatgaagtaaataataataaaggtggtaaagctgtagagaaaatcataaagttggtctagaaatgtctggggtctggatgacataatactacagcaccatgcagcttcattctcagttactcccaggaaattagagtcacataacactgcagaaagaacaattcagaatcttagacccgggctttagccctggatgtgtccactcctaggaccccaaacatctctgtgacctccttgctggaggtaaatccaaccttcccagacgtgtgagaacactaggaacatcctgcacacatagaggggtttctctgtcacagagaaaataacaccaggtttgaggaccccagggactctctgtgtggtgctgacagacccaaggcccagacacagcagaggtccgtgctggggagggcgggtcgtcctgttatggaacaggggtccaaacaagcttgcttctcagagcatcttctggggaactgaatataaacagaaagggaagaggaggagggacaaaagagacagaaatgagaggggaggggatagaggattcctgaacagagaccgcacccatgacccacgtgaccctgggaaatgcttctatccctgagaggaggctcagcacagaaggaggaaggacagcagggccaacagtcacagcagccctgaccagagcattcctggagctcaagctcctctacaaagaggtggacagagaagacagcagagaccatgggacccccctcagcccctccctgcagattgcatgtcccctggaaggaggtcctgctcacaggtgaggggaggactccctcggagtggatgggaggagggagcacagagactggctagggtctcctggggaggacaaggctctgagaggagacagagggcttttgttgaagcctgaggaaacagaacaccagagagggacaggggtcacaacaggaaagtcacactaaactgggattgataaaaagggaggaaaatcaattgatcatgttttccaagttaatcatcatttgtcattaccatttgaaaaaaaagaaaaatgatagaaatcagaactgcattaggatgacactccaaataaaaatataacaaggaaactaaatgctgcccttactcaccaatcagaagttgaaaaataaccaccagatacactcattaactcatccacaagcatttgcaatcaattttagtcaatggcatacaacaagcatcagacaagtctcagtcatcacagagcttatgctgtcatgaagaggaaaacacacacacaaagagatatagaatgtgaggtcaggtgttgacaagagccctggaaggaacagagcagggaaaggtcagaaagaaaagacccagggtctgtagagggggtgtcagggaagggatctcccaagaatgccctgatgtgagcaggacctgaggccagtggggagggagccatgcagacccctggggaagagcattccacacagggaaatgccaaggtcaaaggtgctgaaggaatgggggtgtcacactgctgactttgactcagtaggacacacacacacacacacacacacacacacacacacacacgctccaacgtggaggggtgaagagacctgctcaggacccagggccctgtttttccaccctaatgcataggtcccaatattgaccgatgctctctcctctctcctagcctcacttctaaccttctggaacccacccaccactgccaagctcactattgaatccacgccgttcaatgtcgcagaggggaaggaggttcttctactcgcccacaacctgccccagaatcgtattggttacagctggtacaaaggcgaaagagtggatggcaacagtctaattgtaggatatgtaataggaactcaacaagctaccccagggcccgcatacagtggtcgagagacaatataccccaatgcatccctgctgatccagaacgtcacccagaatgacacaggattctataccctacaagtcataaagtcagatcttgtgaatgaagaagcaaccggacagttccatgtataccgtgagtatttccacatgacctctgggtgttgggggtcagttctacttcccacatacgggattgtcaggcctgggttgtgcctgtggccctctctgcattacatcctgtatcagggtttggacatttagtgcaggacacacacgggggagacaaacttccacagatcagaattcctttcctggatccagaccctgcagacactcgctgcagaggaaggacagtctgatggggggactcagcagggcgaggtcagtgtcagacaagcaccccatggtctccccatggacctgaccctgagaaagaccctggagaactggatcagggcctggcctgaggggtccccctagggacccctcagagagaagctcaactcttccctgaactgagcccctgtacaaagccctgtccctggttcctgattccaggtgatcctggggagtctgtgccagggctgtgtggtggcctcttgggcagggctggctgggagcaaggatgtgagctatccaagggccatgactcctggagttggtcaccagccaggtccgagcacccagagcctcatctagctgaggatagggcctcctccttcacttgaggctcagcatggaaaggacagatggaaaaaattactagtgcatgagcccactgccctgggggacacaggttactccctgggaagttcagagtccccaaggggaggaacagagaagagaggatgctcctggcagctccatgtccaccagggatcaggcccagggccctctgtcttggaagcaaataatcatagataactgttcacttgggcagctcctctgtgcagagctgagatcaagtaattgtaaatattttgaggttaactcacaaacaacctcacagccaaatagcacttatcctacttatagaaaggaaattgagggacagggagacagtcactaacaagggtcacacaggccataggtggcagattagagacatatgaggtctgtctgcagccacagccccctcctctcctcaaccgggggtgatggggctgtttgttgttaggcatctgcatctgaggccagtcatgggttcacttccttttgtcttgtgcatccgcagctcagaagtggagattctggtctggaaagtaagaagcaaacagagaattaatcagttttactctagaactaaatcacctgcctcaaataacagagtcagtgctgggattgtccaggcctctcccttcgatccacagtcccctcactgcacctgaaatcctgtttcccgatgtgtgggtgtcactcccatgggaggataaaggagaggactttgctttctctccccactcacaccctgcaccagcacaggcccaaagtgagacacacgctcgctcaggagttctctcttgaaaaagggaagaaaggaagaaggaatgaaaaaaggatccataacctctttagagaccggctcctggatgcagaatcctatgaggttctggccacacctgtttcttgtccctcaggggctgacacccatgttccatccctctgaacccctgtccctaaacctaccccatctcatgtgactctggggttccttggtcattagagggttttcaggtctccctggtcctggtctggggcagccaagaggctcctggtccctggggtctctgaggtcactgtatcccccactgctcactgccatgggtatctctggctctttctgctcctctctgtccctcattttcctcccctttcattctagctgggatgccctgccctgcacagcttcctccacccttaggccttccccagaaaacccctctaacaaggctggctgtcctgttcccttcctgctcacactgtgtcctggcccacatcccaggcaacagagaaggcacagaaatcagccggagcagccgcccctgccgggctccatcacgagccaatgtccccaagtcaacaggagaatgagcttccactgtgtccccatccagggctctttcccccagtgaggccgacatgtggaacaggccacgggacagggacaagcgactcctccatacagtctctactgactcaccaggcagtcagaggcaggatgacaggtctgctttccccaaggcccagaggctaatttcatccattgacttccgtcctcatcttggtgtgaggctcacatcctccagtcattccccaggaccttccccaggtggagccggccaggcaggtgctgtctgatgggtttgctgcccattccacatacactactgtgtcctcatgatgatgccattgtcataaggtggggtcccttggactgagaagtgcaccagccactggagtctcacatagactctgcccagtttagatgaacttaaactctcattgtgttttctcaggttaacaggagaggaagaaagcatttcacatgactgtttggggctccttccctatttgcctaactgcacaggaattaggggcagggagctctttctaaatttactaacataacacacgttgcttctaatttggcatcgttccttcctttatgtaactgacacacacctaagacttcctctcctactggttctatcctcctaagaggactcatatgcctctctctactcaaggagttgctaatttcaaaccaacttcagcatcttcatttgacgacaatatgatcctgctggaattcacagcacacctaaaccttagtatgttatcaagaaaaatactacttccagcccttgatctttgatctttaggacattagtaacgatctccacttatggaaaaaattaaatgtttcccccaaagttcttttattttttactatattcagaacataacatgaggtctaaactcctgacaaacttttcaaagcaaattacaacactacaggtcaagcatcccacatccaataatccaaaatctgaaatgctcccaaatctaacactttttgaccactaaagtgatgctgaaaagaaatgctcactggagcattttagattctgggttttcaaaattagggtgctaaacgggtaagtctactgcaaatattcaaaaatccagaaacagtcagaaatccaaaacacttttggtcctaagccttatgcgtaagtgatactcaatccgtatgaactataggtaccaagctgtacagcaaatctctagaacctcatcctgtgtataactgaaagcgcacacccattgactaactccccattctgcctctcccaatccctggcaaccatgattctactctgattccatgagtgtgactactctagggacctcatataagtggaaccctacagtatctgtcctgtgagtgacttattgcatttagcataatgtccaatgggagaaaatatttgcaaaacttctcctcaaatttctgtctcatatctgtcaaacacacatggtccttgagagtcagatttgcagcatttcatgctccccctttccaccactcagctgtgcatttgcaaacatccacatgtgtttatggagagagccacagggtcctcacctgccctccgcagagggagaagaaacattaaaggccaaagaaaaggaacacggttctgctgggaaattcaggcagctcctgcctgtccccctcactgtcttctagatcattctctgaattctgctctatctgtaggtgtcacaggctcaagtcagtcattattaaacacctgggaaaaactgccccacctgtggttccactgcctgatgaccgaactgacctccaggcttgcccctggtgtcccctgtgttatttctgctgaaaggtccaatcccaggccaggctgcacagtatccttggggtttaaggacaataagaagtcccatcatcacccatctctagaatgtccttagaaaaggaagccacacagaaaatacagctaggggggcaaagtaggactaaagcttgaaaagacccagcacctgaatgtttcaggtgaggactccaagggaagccaggcaggcagctggtcagggagaaaccaggagaagcacaaggggctgtgaccccgggtcctgtgtctgtccatgacccaatgctgctgctcaattcacacttgagaaagactgtgcttctcccacacagagcaggtgatctcacacaatctcagccctcaaatcatcgtgcatctgttgtgtgacacacacacctgccaggggcttttaaggactcaagggggctgagaggtgagagatgccaactctgattgaaagatgcctgtggaggaatcaaaggtgccacacagggcaatcttctctctgttttctgcacagcggagctgcccaagccctccatctccagcaacaactccaaccccgtggaggacaaggatgctgtggccttcacctgtgaacctgaggttcagaacacaacctacctgtggtgggtaaatggtcagagcctcccggtcagtcccaggctgcagctgtccaatggcaacatgaccctcactctactcagcgtcaaaaggaacgatgcaggatcctatgaatgtgaaatacagaacccagcgagtgccaaccgcagtgacccagtcaccctgaatgtcctctgtgagtatcttctgttcctctgtggcccaggctgccagcccaaatccacacagccagagtccaggtctctcagtccctctcaggtctaaggactcagaccctcacccaggctggccatgacttcctgccctgagcaaacctgggcagaccaggccttgaccaagaatgggaggggaggggctgtctcctgtgctacttctgctcaaacacccattcccatcatcactcatctccaggatgtccttaaggctcagggttcacattttctgatgggagaaacaggtgaatgtctcagactttggctcaggggacatagcgggggtttggttgagacttcagggttgtgacatggctcagggggacaccgtggcccttccacagaccaggaacttatgcttccctctgacaacatcacctgtggctttattctgtttcctccagatggcccagatgtccccaccatttccccctcaaaggccaattaccgtccaggggaaaatctgaacctctcctgccacgcagcctctaacccacctgcacagtactcttggtttatcaatgggacgttccagcaatccacacaagagctctttatccccaacatcactgtgaataatagcggatcctatatgtgccaagcccataactcagccactggcctcaataggaccacagtcacgatgatcacagtctctggtaagtggatccatgaagcactagcatcacattttcaggtggagtctggctctcagagaagagccaggaagaaattttctttcccaacctgtgtccaaggggcacacgcaaatcccaaattctcccctgaaccctcccaattcacctctgcagactcttttccccttgtttttttgttttttgttgttttttgttttttgatttctcatgtctgactttgggtccatcctggaatgagaggagggggctccctcagcactgagccctgtgtagtgaaaggggcttcacagagaaaaaaggaggaagggtcctcagggtcaagttcctgctctctgtcaccaacaattccctttctgtcacttctttgtgttcttttacctactccataagctacaagggacaaggaggttttgaaatgagctcacactttttccttaaatgagaagaggaagccccttgggtgatggaggagcagctcagactctgcccccatctctgctcccagcacccccagtgactgactgaccccaccctgaagccacctaaggtggaaccagggcatatggagaaggtgcccaggtgtctgtcctgaatcaggctaaatcaagatgctaatcaacaccaaagcctcccctggatcaggccgcaggaaaatgggaagacatggagcctcatgacagactgctgagctgtgtcctggctctgaagtcactggctgtataagactgtgggcacagcacatgggacacagcacagaggacagcaagtgacgcacacttggagacatagggagattcagccatggggactctgcatggcagggaaggggcagtgacaaaaagtgtgtatttatagagaggataagactaccagccactatgtatctaatataggacttaccttttcaacccttccacgtgtgcaggtccgtagtattaaacacattcccgttgttctgctaccatcaccaccacccacccacagaactctcttcttcctcccaaaatgaaactctgttcccatcaaactcctgggcagagctgcccacctgtgacccacagcctgacccctgaactcacctctagacttgcttctggtctcccgctcaaacccccatccccatcatcacccatctccaggatgtccttaaatagcaaagcctcagaaaaaacacaccttggctgggtggtgtgggactgtgcagctgaaagaaacagcacctgcatgttccaggtgagtaccccaaaagaccaggcagtcagccagtcagggaagaaacaggagaggtgccagaggctgtggctgtcagtcctgtatctgcccaagactcaatgcttctgccctattcacatttgagaaagtctgtacttctcccacacaaagcaggtggcctcgatctccgagccctcagatcgttgtgcatccgtcttctgacacacacacctgccctgggctcttaaggacttgggtggactgaggggtgggagatgccaactctgactgaacgatgcctgcagaggaatcaaaggtgccacacacggcaatcttctctctgttttctgcacagcggagctgcccaagccctcggtcaccagcaacaactccaaccctgtagagttttctacatataagtttaagttatctgtgaacagagataattttacttctttccgatttggatgtctgtttatttgtttgtttgctgcctaatttctccagctaggacttaaaacactatgttgaagagaagtggggcaagcaggcatccttgtcttgctcctggtcttacagggaaagctttcagtctttctccattgagtatccctctattatgttgaggtggtttccttccattcacagagtgtttttatttataaaagaatgttgaattttgtcaaatgcttttattggctaaatcttattactaattataggtctattcagatttttttgtgtgttccaggaatttgtccgtttcatctaggttatccaatttgttggcatacaattatttaccgcactcttttaatctttattatttctgtagaattggtagcaatgtcatcaatttttttgagagtaggtctcactctgtaacccaacccaagctggagtgcagtggcttgatcatagcttacttgcaggctgaaccccctgggctcaagtgatcctcctacctcagcctcctgagtagctgggactacaggcatatgccatcatgcctggctagtttaaaaaaaaaaaaatgtggagactgtgtcgccctatgttgcataggctggtcatgactttctggcctcaagcaaccctcatcctctgacctaccagggtgctggaattaaaggtgtgagccaccatgcccccattttcatttctgattttagtaatctgaatcttctctttttttctcagtcaacctagtaaatgattgtcaattttgttgatctgttttgaagaaccaacttttggtttcattgactccctttattgtttttatagcctccattttatttatttcagttataattcttattgtttccttcattcactatctttgggttgattttgttctttttctatatcctgaatttgtaaagttaggttgttgatttgaggtctctctttaatgtaagtatttaccactatcaatttcttgcacaagattcttaacttctctgagccttcaattcttcaactgaaaattgcaataattctcatcactaagaaatgggtggaaaaaatgaaaattgaaataacaatgcctgtttcatagtatcgttttgaagatttaatgtaacatttgattaagccttcagcaaaatgccacacacaaagaaaagcttcacaaatattagctattattattactactgttaccattaaccttaaagtcaggtagtcctagagtcaaattctaaatccacttgtcactaaccatgtgactttggataagttttctcatcaccctaagcctctgtcttttcatctgtaaaatggaaataatgtctacccaagagagttactgtataaatcaaatgagatacaggtaaagtatttagcacagggcctggtatctaggacatgcccctcaacagtagctaacctagcattaaccatcgcactgagatgactggtgagggctaagcaccaaatggaaactcactaggacatggttactggctaaacatgggagagaggaaaaacagtgcaaagaatcaagcctggtatgttagctttcatccactgagatgcagccaagatgggattagaggtacaagataattcactgggtaaaacagccatgagggaaggtggagcagcagtgacaggagagcctaagagagccctcagaccacgatgcagatctcattcctgagaaggagaaagagaaggagggaagttttacatagcagtgcagttctgagtttccccaagaccgatggggagtccttgaacccctcacccatgagagtgaagcagggtctcacagacctgggcttgctttctttcccctggtgggagcccatgggaagtgagttctctgtgcaaagaacatagtaaattcagaatgcactagcctgggccttctgtccatcaagtccctgccatagagctccaacaggctcttattcatggctgccacaattgagacactgagaaaaagatgcaaacataaaaatatagaaagttctaatgacatgcaaaaatagcaatcagactttctcaaattttcaaagccttcaaaaatgtctgagtgcagaaagaacaggatgaaattgacagaagactgatcaccaacctagaaacgtggtaagagagaaaaaaaattgcaactttcccacaaaactagtgtattccttgaaggaacaagtcaagcctacttcatgttgacagctagttcttggggaccccactgtagaataacatcaccttcattccttctctcttcttcccacaaggaagtgctcctgtcctctcagctgtggccaccgtcggcatcacgattggagtgctggccagggtggctctgatatagcagccctggtgtattttcgatatttcaggaagactggcaggtatgatcgcctttcctcttgccatgtttcctgcagggctgaccaccatgcttgggaaaggaaaaaaacttcttcacctgtatctgggactggatctccttctaccgctaaactcctgcttctcagcactaattcctgcaggtctcttcttccctggtcttcatgctccctgtaccccactgtctcctagatataattatccccagcctctgctcatttgtttcctagagtcaatacattgtcaaagcctcttcgtcctttttcaacatctctcacttttgtcagtctctccattcccatcaacctcaataattgttcaacatcctgcttgaccccttgttgtaaggttggaatccttcttgcatatgactgcctcattaccttcctaaaatctagttcactcacctacttaaggagccaaagggggccaggcacagtggcttatgcctgtaatcccagccccttgggaggccgaggtgggcggatcatgaggtcaggagatacagaccatcctggataacacagtgaaaccccgtctctagtaaaaatacaaaaaattattcaggcatggtggcgagcacctgtagtcccagctactcgggaggctgaggcaggagaatggcgtgaacctgggaggtggagcttgcagtgagccgagatcgtgccactgcactccagcctgggcgacagtgcaagactccgtctcaaaaaaaaaaaaaaaaaaaagaagccaaaggaacctgctctggcctactagttaagttcaaatttcttctctttactaattcttcttactttctttccctctacttcccagtataattcctccatcttaattagaatctgactctctacacatccctgcccctttaccccggatgcacatagaattcttagtttcaatgttacacctaaaaacagggtgatctcccctccactacctgccctgtggacttactcacacccttcatcacaagcaacctcttatttcatggagaacacagactgtgtagtattaatatgtgaactttggacacatcctgcatgtggctgagaaccttttcctgacaatcaattcatgtgttcataacagatacagaaatgaagaaggcaaggtccctacccccagggaacataaagcccaagacaggagataagacctgaaaaataatcatgataccaaagtagaaaggagcgaatgccacaaaaattcagataaatctgatgggaaatatagctacacattggaatcactccgaaacatttttaaaaacggatgctcaagccccaaccataaattctgatctactgatctggagtgggacccaggcattggtaatttttaagcctctccagacgctactaatgtgtagccacgatggaggatccctgttctaataggtaggacttggggctaaacccatggtttttagctaggaggattagaattacctctggagctttttcaacatacatgggcctatactttgttggcctaattcattaatgggctccaccaagaactcagtaatctaactgagaaacagaaactaaaaggaaaagccgccttatttgatatgttacattatatgggaagcactgtcaaatgataagtgatgctaaaccttctctaagttatatttatggttatgttattgatgtgagtgttccaaaaattataagagattcccagaaatctaacagattataagccataatgtcatatgccacagaagtaactaaatgtctatgggagatgcattctttttttatttttatttttatttatttttatttttttttattgatcattcttgggtgtttctcgcagagggggatttggcagggtcataggacaatagtggagggaaggtcagcagataaacaagtgaacaaagaaacaagtgaacaaaggtctctggttttcctaggcagaggaccctgcggccttccgcagtgtttgtgtccctgggtacttgagattagggagtggtgatgactcttaacgagcatgctgccttcaaggatctgtttaacaaagcacatcttgtaccgcccttaatccatttaaccctgagtggacacagcacatgtttcagagagcacaagtttgggggtaaggtcacagttcaacaggatcccaaggcagaagaatttttcttagtacagaacaaaatgaaaagtctcccatgtctacttctttctacacagacacggcaaccatccgatttctcaatcttttccccacctttcccccttttctattccacaaaactgccattgtcatcatggcccgttctcaatgagctgttgggtacacctcccagacggggtggtggccaggcagaggggctcctcacttcccagtaggggcggccgggcagaggcgcccctcacctcccagacggggcggctggccgggcggggggctgacccccccacctccctcccggacggggcggctggccgggcagaggggctcctcacttcccagtaggggcggccgggcagaggcgcccctcacctgggagatgcattcttatcataatgaactctcatcagatgtttaaccatactcattttcaatctttgtcattcactgacaattgttttttgttttgttttgtttggtgggggggttgttttttgtttttgtttttgttttgagatggagtttcactagttgcccaggctgaagtgcaatggcgtgatttcggctcaccgcaacctctgcctcctgggttcaagcgattctcctgcctcagccccctgcacagctgggattacaggcatgcgtcaccatgcccggctaattttgtatttttagtagagacggggtttctccatggtgataaggctggtctcgaactcctgacttcaggtgatccacccgcctcagcctcccaaagtgctcggattacaggcatgaaccaccgcgcccagccccgacaattattttgattcttccttccttaaagcatttgcaatcagctaccatccaaaattgcttcttcattgaggatatttacagaaaatactccgacatgtactcttgaatacaagtttctgataacattaaaatcataccattagactatttaagaatttccaaaattttaacaaactgatagcttcatgaaactgccaaccaagagcaagcagagaattcatttcatgagactaaaagataataatgaaaataatatttttatgattttttatttgaaattttgtggattctttgttttgtttcccagatttcaggaaacattttttcttttaagctatctagagcttcaacaattttgcgaacaaaaattgaaacatctatattttctccctacctgactgctccagaattcggaaattattcatgaatatttatatgtttataataatatcgttatttgcacaaaaaatatagttattaatattaattgttataaaataattattattgataaacaattatttgatgatcattatttaataatttattaatatttattaataaattaataattattatttaacgactaattgtaattgttaattaatattaatattatataataaatataatagtatagttatttgctcaataaaaatctgctccctttataacaggatacatttgaaaacactggttatattacccaggctttgattgggatgttatatttgggaatatacatagatgaacccataggcactgctggcaaagtctgaagtcggccttggtttggcttcctcatgtcaagaggtttctaaaagtttaatctgagattccttataaaaacttcctgtaaaacaaacttgaaaagaccccaggctgggcacagtagctcacgtcgataatcccagcactttgggaggccgaggtgggtgaatcatgagatcaggagttcaagaccagcctggccaacatggcaaaacctcgtctctgctaaaaatacaaaaaaaaaaaaaaaaaaaaagctaggtgtggtggcgggctcctgtaatcccagttactcgggaggctgaggcaggagaatcacttaaacctgggaggtagaggctgcagtgagctgcgctccagcctgggagtgcatacataggcctatactattcatgtgcgtacatgggcctatactattcatgtgcatacatagggctatacataggcctatactcctattcaaggagaatcgcttgaacttgggaggtggaggttgcagtgagctgcactccaacctgggcaacagggcaagactctgtctcaaaaggaaaaaaaaaagactatgtggtcacctgctactcttgttgcacttatataaagaatgaggccaagttcgatgagactaaacttatttggaaaacaaatatgtcttactgggattatctttggtagaaataaagatgcctatgaagagaaaaattatgttgaaaaaaactatagtacacctgttatgacatcacagctctgcttattgttttttattttcattatccacctatagattggaccagaccctgaattcttctagctcctccaatcccattttatcccatggaaccactaaaaacaaggtctgctctgctcctgaagccctatatgctggagatggacaactcaatgaaaatttaaagggaaaaccctcaggcctgaggtgtgtgccactcagagacttcacctaactagagacagtcaaactgcaaaccatggtgagaaattgacgacttcacactatggacagcttttcccaagatgtcaaaacaagactcctcatcatgataaggctcttacccccttttaatttgtccttgcttatgcctgcctctttcgcttggcaggatgatgctgtcattagtatttcacaagaagtagcttcagagggtaacttaacagagtgtcagatctatcttgtcaatcccaacgttttacataaaataagagatcctttagtgcacccagtgactgacattagcagcatctttaacacagccgtgtgttcaaatgtacagtggtccttttcagagttggacttctagactcacctgttctcactccctgttttaattcaacccagccatgcaatgccaaataatagaattgctccctaccagctgaacagggaggagtctgtgcagtttctgacacttgttgttgaacatggctaaatacaatgggtatcgctgagactaagttgtagaaattaacaaatgtgctgcttggttaaaatggctacactcatctgactcattctttattctattttagttggtttgtatcttgcctaaggtgcgtagtccaactcttggtattaccctcctaatagtcatactagtagtcatactccctggtgtagtgtattctctaaaagctttaaatgtctgcatgcagccagccatcaaatagtgaatggtctctctttggctggaattacaaaactcagagaaatgtgtcatcaggagaacatcataacccatgaaggataaaagccccaaatggtggtaactgataatagcactaatgctttaagatttggtcacactctcacctaggtgagcgcattgagccagtggtgctaaatgctacatactccaactgaaatgttaaggaagaagatagatccaattaaaaaaaattaaaaccaatttaaaaaaaaaaagaacacaggagattccagtctacttgagttagcataatacagaagtcccctctactttaacttttacaaaaaagtaacctgaactaatctgatgttaaccaatgtatttatttctgtggttctgtttccttgttccaatttgacaaaacccactgttcttgtattgtattgcccagggggagctatcactgtacttgtagagtggtgctgctttaattcataaatcacaaataaaagccaattagctctataactaaatttgttgtaattctgtctcttgatgtgggttcacagccagccacggccagtggagtctctcaggcggcgtcattctcactccgaccctcctgccttcctctttcacttacaagggcccttctgaatacactgagctcgcccagattatccagaataacctcccatctcaagatccttaactttacttatttgcaaagtatttttgccaaataatgtaacatgcacatgttccagggattaggatgtggacatttttaggaggtcattattctgcctaacacaagtaactttcataaacatcacccacaacaaaaatttgctttgccttccttctgtgtctcacctttctgcctgaatcacaggccagagcacaaacttcaaggtgaaacacaccagctctgctgtgaactgcctggatgatcctggaccactcacttcacctcccacagtctcttctcatttgcagcacaaggatgacacttactgcatcagaaaatgacagtgcaagagtaaattaagatactaaacacagagcgtggtacctgatgagccctcggtaaacattcctttcagtctcttcctttcaacatcctgtttctttcaccctcacccatctgccctttcatcttctttctcttcagcaacttacacagtctaccctaccagttagcaaagaagccagctacccattctctcttgattctgctggaatgttcttgtgatagagcctgctatctactcaagaaagcccacattatttatatggagaggtctgtttagaacaagaggtcctttttatgttcgcataaaatgtgtacatatggccgggtgcaatggctcacgcctgtaatcccagcactctgagaggccgaggcgggcagatcacctgaggtcaggaggtcgagaacagcctggtcaacatagtaaaaccccgtctccactaaaaatacaaaaattagctgggcgtagtggtgggtgcctgtaatcccagctactcgggaggctgagacaggagaattgcttgagcccaggaggcagaggttgcagtgagccaagatcacgccactgcactcaagcctgggcaacaaagagtgaaattctgtctcaaaaaaaaaaaaaaatttatacctatgtccccttaacttacacatacccatcccaattctgccctgttaatttatatgtgcacttccttattcattcttctttagtctttctctttataccttataatctaggatagcacagagacaaaactaatgacccaggccacaagaggggattttttttttagcaagacgaatgctttccattaaaaaaaatcaatgctttttttttggcaaaaggaatgctaatttgcaaggcacccctgaagcctgtttttaggcttggcttttggaaaaaccatttgagcctacaacacactcttagacgctccccaaacaggagacgataattaccacagaagccacattcactccacgtattcctgctgttggataaatgtattttcacagaatgttgagcatgagttactcctccccagtccttccactcctggaagttaaacttccttcttaaccatcttcatctccaggtggactgccaggactctggctggaaaataccgcccacgctggatggccagggtggcacctttgcctattcccataattataatagctcacactaatgcagcactcactatgcaccaggcactatcctaagagctttccagctagctacagtcctcacaaaacatcctgagtgccaccatccccatttttacagatttttaaaactgaggcagagaagtgaagtagtgtaaccattgtcacccaacccataatttaacctcattcccctccccctctgggcagaggacaccctaagatttccaaggtctcttgaatgacatccaccttccagaatgatttttgccccctctactctcaggatttgacaaacagccagcattttgttttctgtctcactcttcacttatgcacctgttccctaacaccacactcacaactgcacagcctggaataaaagctggcttttatggacctcaatctctttggaaaaaaaacagggccaggttcccagtcatatacaaagtcatttttactcaattgtcaactacttgcacagccattccctggccacaattgaggtatgctagggacagaaagtgtaatgagaaggaagtaggaggagggtgacttcctggaatggtcccaaagaggagaagatttcaaatccagaagcagtcataaaacacacccagagtatggcctttgaataatgacagccccacctgtctctttccatgcctcgtggcctctatcttccttctcagcctgcccttcctgcccttgctttcttagatcaatactaaccacctgggagctggggccagaccagagcacatagcactgagtcgtcagggtggaggagctgaaaagagagaagagtgtttaacttatgggcgtctgactcacctaggtacacatcacctgggcagaaagtggattcatgatgacctgtgcgagacttatggtaattcatcaaaatgagtgactgaggcaagtgtctgaatcaatcgagatttattaagccagagcttgagggcacgccctgggaaaacatgaggcctagaaaacctctgtggcttgcattctctctgaagtggttttcaagagaccaggttttctgtctttttttttttttttttttgagatggagtctcactctgtctcttaggctggagtgcagtggcatgatctcggctcactgcaagctccaactcccaggttcaagcaattctcctgcctcagcctcccaactagctgggattaaaggcatgtgccacaacacctggctaatttttgtatttttagtagagacagggtttcaccatgttgctcaggctggtctcgaactcctcatctcaagtgatccatccaccttggcctcccaaagtgctgggattacaagcatgagccactgcacccagccgaggccaagtgtttatacgtttccttaaagcggggaaggcagataggaagaggtggggtaggcagaagaatgattaatcttgcctttgttctgtacctggaaagataagcattatcagtctgaaatataacaggctttattcttaagaactagatttagattgcagacctaaagttacaatcgacatgttcttgttttatgggagaatatacatcttaaaaggtgtataaaaaataaaaagggtttgagagcagcaaagaacaatttgtgagggcagttatccagagatgcctgaggccttttcaccttcccatggaggtctgactaatgtacaatgccttgacacaaggtcgtgtagtaatagctattcattttaggaaatgattatggtgttacatgactcagtctccaggttgaacttccctttggcataaagagtttgggagttctgagatttttttttccctttacatttaccccctttttttttttttttttttttttttgagacagtcttgctctgtcacccaggcagctgagctggagtgcagtggcacaatctcagctcactgcaaactccacttccaaggctcaagcaatcctcccacctcagcctcccaagtagctgggactacaggcacatgccaacacacctggctacattttttttttttgtattttttctggagacaaggcttcaccctgttgcccaagctggtcttgaactcctgagctcaagtagtcaacccgccttggcatcccaaagttcgaggattacaggcatgagccactgcacctgaccagcacctattcttcaaaatctttcacagaaagcgttgtagaaaacatgagtttttggctgtatgtttcgtctgatcctacatcactaggaaggttcattcttaggacattgtgttccatggagaagggcatgaagttcattagaaaaagaccaaagtcaagttacgggaacaaagggaaagtaatcctggaaccctattcaagctacacagctgcctcttcaactaaagcaattctttaggcaatcatcactctaaccctttcagttatatgttggctcacttgtaatatgtggtaatatgtggagcagactataggctagtttttgtgttttttttgttttgtttttttttttagagtctctgaagcatcttcaaattccagtggcaggttcctctggattgtagtctgaatcaggtgtacaactgagccttttcagtagtccatacatcagcaggcatgaaggctgttgatctataatgctgtgtttttctcctgaagtttacttaaattgtctagcttcaggttgcagggctttaggaaaaagcactgttttaatttctaatgattccaagtcagaaaaacggaagaaaaatttgaaaatgttagctttgatatacaaaaatgtaccaaaaagtacagcagagtcactacatcaagactagtcctacacaaatcttctgtcattaaccaaaattttccagaggaaatggtgatttttattgtctgcttgaccagattgcacagagaaagagaagccaggagcctcactggaaataaattcttacccttttgctagctgatcatcttcctggattccgtcatggccaaaaacaggttatggttgtacatcaggttttagtagcaagacaggttatgggagggagaaaggaggaggctcggctaacaaagatggtcttgttatgtagatgaaacttcacaggtagcagctcccagagagagtagatggtaaatatttatttcagatctttaaggtatcaagctcagttcatttttcctggatccagacaagagaaagtctgcctgtattaatagggattctctacagatgccaattttctcatgaaagacagctttgcagggccacttctgcttgctggccctccaacagacatctcaaaataggtcagaaaatacattttgggttaaacatcttatttccttcaactgacacatgtttctagaggtttaacttggtgtcctgcagttgcgggtgttttcgccaattttgaggacggttcaccataatgtagagctcctgctggatttgaccaagttggaaggtgttttggacactacgcggggtcaagagttggtcaaatccaaaggaagaatgacaaaaatcaaaaacacaacaagtgattgcacaaattacgtactgttgaacactctaagcataaagagaggttagagccggccgggcgcagtggctcacacctgtaatcccagcactttgggaggccgaggctggcggatcacgaggtcaggagatcgagaccattctggctaacacggtgaaactccgcctctactaaaaacacaaaaaattagccaggcgtggtggtgggagcctgtagtcccagctacccgggaggctgaggcaggagaatggcgtgagcccgggaggcagaggttgcagtgagccgagatcgcgccactgcactccaacctgggccacagagtgagactccatctcaaaaaaaaaaaaaaaaaatagagaggttagagccaactagcaataaaccttaatctgcagctatcaaattctaaaacaaaatcccaacccagctccttacctgggaggggaccaagctgaaggctgctctccattggcacaggagaagaaaactcaccttccttataggaagtgagcaaaactccaagagtaaaggaattttatggcaaaacaaaactcagatctcaaacaatcaactggggagagcagtgacctcaagaaggaatagcatctgatcctcagaaagtcacaaaatcagtcaaagctaaagcttgatagttggtaccaagcgtaaacaggagaatcgctgcaggcctaaagagctaagctccactcagagggttccttcatggtcaccaaaatgttaaccaaaatgagtgactggggcaagtgactgagtccattgaggtttattaaaccaaagcttgagggcacgccctggaaaaacataagtcatagaaatgctccatagcgtttctcatctttgaagaggttttcaggaggcctgatacttatacatctgcttaaagtggagaagggagataggaagagacaagtagagggaagaataattggtctcatctagtctttcttctgtacttggaaatacaagcattatcattgtgacatctaacaggctttagttttagaagctagatttagcttatacacctattgttacaattgctttgtccttgtttttttttgagacagagtctcgctcagtcgcccaggctggagtgcagtggcacgatctcggctcactgcaagctccgtctcccaggttcacgccattctcctgcctcagcctcccaagtagctgggactacagacgcccgcgactacacccggctaatttttttagtagagacggggtttcaccatgttagccaggatggtctcgatcttctgacctcgtgatccgcccgtctcggcctcccaaagtgctaggattacaggtgtgagccaccacgcccggccgctttgtccttgttttatgggaggatatacatcttgaaaagttccaaggccagtaaagaataatttgtgaggacagtcacccagagatgtccgaggtctttttgccttcctgtgggggtctggctaatgtacaatgctttgacacaggttgtataataacagttgttcatctggggaaaagatggtggagtcacatgactcagcctccagactgaactatcactttggtgtaatgagtttgacagtcctgagatttttactttcctttacataattttaagagtcaaggggctgggtgcggtggctcatgcctgtaatccaggcactttgagaggccaaggcgggtggatcacgaggtcaggagatcgagaccatcctggctaacacgaagaaaccccgtctctactaaaaatacgaaaaattagccaggcgtggtggcgggcacctgtagtcccagatactcgacaggctgaggcaggagaatggcgtgaaccccggaggcggagctagcatgagccgagatcacgccactgcactccagtctgggcgacaaagcaagactccatctcaaaaaaaaaaaaaaaaaaaaaaaaaagagccatacttcctcgatgctgttccactgaggtcaaagggatgggtgtggaaggcatcacagctttttcctatttagaaacccattgacccttccttctccccctattgggttacattcctctgtccatagatcacatatttactgagttgttttccaggggaaaaaaaaatctcagttgaactccttaaagccccaagcattcaattcagttcaagagtgtctctcattttaatgatgaccaggcataaatattttttaaaggctctccagaaaattttgataagagcctctgcacaacccacagtagctttggggagcactgagctacaaaagtgatggggaaggaacctgctatgtgctggggacctttatatgtccaccttatctaatgccccaaatgacgctttaagtaggcactattatccccctatcccaagacatcaattaacttgtcctttatctcagaattggtcaaaggtggaaccaggattccgactcacatatttctgaatctaaaggtcatgtttcactgcagagcgattgagcctacacgaactcaaagaaagacaggatgactgcttctaacagaaataaccatacagtcttcaatgaagagtcagggtctgaaatgagccttaggacaaagaacagctcaggaggctgagaagacagtcaaaggtattgtggaaaggagtgaaagaattagaataagttcagacatgaaaacataaaatggggatcaagtctttctacacaaaccaagggagtagactggggctgtgttatggggcctttgaatggcagcctaaggaattgaaacttcattctatggatgataggagtcactggaaagctttgagaagctcagtaacatgacaaacagcatttccaggaagattactctgacagtgtaaccaaaaaccagtgtaacgaaaaccaggttagtcgcatgctgcatgtagagtcccatcaacatgagtgaggtccgatacaaaaaaaaaagtgaatttattctaaagctagcttggaggaaggggcacaaagcattctgcctttaaatgtgctgctccacctttggagcagaaagcaggcatttttttagaaggtaaaagagaaaatgagcaagaacaagcgtccccctgctactgggcaattatctaccgggcagttgagatggtgccttcctggacagaagtaagttgtaaaaatggccacgtgggcatgcttctgacatgttcccctagtgggtgtaagttctgaggtgacccaggatggaagctctgaggcaaccctctggaggtgaaagttccatggcaggtattctttggtccgctaatgaactgtcaactcttgagagattcatcacggagcacacagctagaggaacttgccctgtagggaatgtctggtgatgggggaggtggaaggttatatatgcatttctgaagggctaagggtaggaaacgggtagccagggaaatgagacaggagacagagggaggaaaaaataattaaaccacctctagaaaaatgggggtactcagttaccattttccactgccaagctttatttttatctttatgggatctgggtgccatatttgttctgagtactttttgctgaaagggcgcatagtcagtgagcattagaatgaaactgatctacctggagttggaaatatttatgagtacccggacttatagattatattggttggagcattgtggtctgaggtctagaaggtctctgggaaagcgtgccttgtatttttataaacaggttgtaatatcaggaagctccacaccagagggatatgcctatccctgcaagcagggccaatgttataagcagcttttgctcctacgatggttctgacccaaatcaggatgctaaccattggtcagcaacaatgtggggttaggagaaatgaaataattatttctgttaaaacaattaaaaaaattaagctacctctagaaaaataggggtacttggttacaatagtgttaggcaagataacttagagatgtggttctgaactctgacaacttaatagaattacctagaagcttttctctttttctaaacttttcattttgaaacaatttcacactttcaaaaatgttccaaaaatagagtccccatatacttttcactcaattttcccaaatattgttttagataaccacagtgcaatcattaaaatcaatacataggccgggcgcagtggctcacgtctgtaatcccggcattttgggaggccgaagtgggaagatcacctgaggtcgcgagttcgagaccagcctgaccaacatggagaaaccacgtttactaaaaatacaaaattagccgggtgtggcggtgcatgcctgtaatcccagctacttgggaggttgaggcagaagaatcacttgaacccagagggcagaggttgcaatgagccgagatcatgccattacactccagcctgggcaacaagagcaaaactcttgtctcaaaaaataaatttaatttaatttaaatttaaaaaataaaataaatacattaatcactgacattgtacaatgaatgaatctgcagaccttattgaaatctcctctatctccccactaatgtcctctttctagaccaggatccaatccaagatcacacactgcatctcattttttgtcctctcagtctcctttaaactggtacagttcctcagaatttcttttgccttcatgaccttaacatttttgaagagtattggagttattttgtagaatgaccctcagtttgggcttctattttttactcatgattaaacttaggttgtacacgttagacaagaacaccacagaggtgatgctgcaccttctccatccatcatattaggatgtcctaagatgtcgatatctctgatcactggagacgttaactttgagcactgggctaaaagttcctccactgtaaaatggctattttctttggaagcatttgtaagtgaccaatacttgggccacatgatgaaccaatcatctcagactctcttaggggaagacacaggccctggtaagttttaaatgccatataggtgactctaaccagcatctacagcttacaccatgaagattagaatcctggaaatcagctaggaggccattccttggacctaacatccagttccagacacaatatttggcatggacccatgatagggaaatgggaaggcaaaaaaatctcctaactgagaaatgatgggtgagtagaatgctacccaataaaaagagaaggcaggaccaggtgcggtggctcatgcctgtaatcccagcactttgggaggtcaaggcaggcaaataacttgagctcagacgttcaagaccagcctgggcaacatggtgaaaccccatctttacccaaaaaaaaaaaaaaattggccaagcatggtagtacatggctgtagtcccagttacttacttgggaggttggggtgggaggatcactcaaacccaggaggttgaggctgcagtgagccaagactgcaccactgtgctccagcctgggtgacagagaaagaccctgtctcaaaaaaaaaaaaaagaaaaaagagagagagacgcaggacaccaagtaaagtgtccagcccttctggactattttctctccagatctcagagaaacctgtattgtagtgaaagcacacaccatataatttttttttttttttaagacggagtctcgccgtgtcgcccaggctggagtgcagtggtgcgatcttggctcactgcaagctctgcctaccgggttcacaccattctcctgcctcagcctcctgagtagctgggactacaggctcccaccaccacgcctggccaattttttgtatttttagtagagacggggtttcaccgtgttagccagggtggtctcgatctcccgacctcgtgatccgcgtgcctcggcctccctaagtgctgggattacaggcgtgagccatggcgcctggcccacaccatataattttactatcacaagcctgacgtgagctcctgattgccactgacgggaagggaattatgaattatgtcatggaaatatatgaccacatatgccaagatgcacacttccgggtataactgaatgaaaaattcacaaaatccacatcagagatacatgacctcccctaaacaaccctgttctccccacttggtcttttgtccttaatttcttttgaagtaagagaataaagactgttataaatttcacaaaataggaaagtgtacacatctcctgtcacccggctgtttaagcaagaggacactgtgctcaacttcgttagagttattatcttgaggtttttataaagagatatcatcagtcccctccttagaggggccatctgataacatgcaaaaaaatgccactgtaaccaaaacccagaggcaggaaggaccctgagaagagcaatccctaaggtattcacatgcctgccatggtctggtgctgctggtacaggaggaactgctgctggcaatagctcgaaaaaaagagaaggcagggtcaagtgcagtggctcacgcctataatcccagcactttgggaggctgaggccggcagaacatctgaggtcaggagttcaagaccagcctggtcaacatggtgaaaccccatctctactaaaaatacaaaaattagccaggcgtgttggcaggtgcctgtaatcccagctacttgggaggctgaggcaggagaatcacttgaacctgggaggcggagtttgcagtgagccaagatcatgccactgcattccagcctgggcaatagagtgagatcctgtctcaaaaaaaaaaaaaaaaaaaagatagaaggcagctccaacactcagggagtagtaagaaaagaactcactcaaccttcaattctcaattctcacacagccaacacccttccagcctctctatgggggtctcactgggagggctggcacataattaaatgccaatacatggatgaaataagttacagaagggtggcatcaactgggtcaaaaacggttgaacatttcacaaaacaggaaggatttgggttagaccctgaaagactcaggcttaggaaagcagacacaaagagaaacagaagccaagggaacctaagtaaagcatccagccctcctggccaatttcctcctcagacctcagagggacctttattgtagtgaaaacacatgccatataattttactatcctaagcctgagatgagctcctaattgccactgatgggaaggaaattatgaatcatgtgatagaaatacacaacgcacgcaaagatgcacactttgcaccactctggatgcacaaagacacacacaggccccaccggagatgctagttttgaagaaggtcccaggagtaagagtgggtttgcagatgttattttatttactcttctcacacacgatatggggatatttcacaaggaggatactgatcctcagaaaggggaagtaacttgccaaggttgttggtggatgtgggattagaacctcagtgagtctaacaccggaacccatgccaccaccactaccaccgagagacctgaacagggtatgtgtagggaacaggaaggagcagggagagctgaagcagaaagaaaccattttaaaacagggaagttaggtaagcttgctaaacagggataatatgttgcagggaaatgaacactagacagacgttcaaatttgatctgattacagaaaagccactgaaggttttgagagggcagaaccagccaaagtgaaaccttgagccaagaccaaagaaggtggtgaaaaggggagtctggattcctaagctagagagaagccgccaacaacagtgacaggactacgtgatgcatggagcaagaactagtcggagaggctaaagctgtgggtttaaatacaaaaagtcatgcagtaagggcatggcagggtgaagcaagttatattctttctctgcagttcagtctctcttcatctataatcaggtgcaatgagaattaatgtctaaatgaccctcaacccttgctactcaaagtgtggcccaccaaccaaaagcaacgacatgtccaaaagctccttagaaatgcagaatctcagaccccatcagaaggatcagaatctgtatttaaacaagatctttgggggatctgtgagcacattaaagattgtgaagcagttttctgaagtgtcttccagttctaaaatgcaatgatttcacagtcatctgaactccgtcaccttacaggagaaagaaggaaaataacatttaccttcgtctcatttgtgaccttttcttaaaacagcgtcttagactcgcccacatccaggtagaggatttagaaaacacccgaaaggcagtgctgccaccttgtgaccatcatcagtaaatgcacttaactcttagcggtctcgccagtcgtggaggggatggggctggagcgggcagggtgtaggaagtgaagtccaagtcacagatgaggtaagagaaccataaccgcccacaaagactggaagtaactgtcagagagagctcagcctgcatcacagagcaacgacccattgcaaaaaacagtttttataacaatatgtgatcagtgagaaacagttccaagccaagttctgcccttgtaaccttaaaaatcattgtaatgggtatttcctttcttttcttttcttttttttttttttttctggagacggagtctcgttctgtcgcccaggctggagtgcggtggcgcgatcttggcgcgatctccactcactgcaacttccgcctcctgggtttaagcgattctcctgcctcagccacccaagtagcttggattacaggcgcattccaccatgcacggctaatttttgtaattttagtagagacagggtttcaccatgttggccaggctggtcttgaactcctgacctcaagtgatccgccggcctcagccttccaaaatgctgggattacaggcgtgagccaccgcgccaggccactgtaatgggtattttcaacatcagcctcagcctgaattccgccagtaaactggtaattccccaaggaaacttactttactgtgacagttctttcacatcctgagccaaaatgtgtgtgattcgcactcaccaatccttgtcctgtgtcctccataggctgaaataagtctaatacttctttgtacaacccaccttcaaatattgggtaaaataaaaaaaaaaacatgtgccacccatcccaaattcccttggtggtttcccacgttgggtcacgtgaagtcccacaccttccggtccctttcccacggacgagtgaagtgcagcaaccatagcagatgctccaaatcctaggggtgttccccagagcagcagagccacaggacccccgtcaccgtcctggcacctcacccctatgtagaagctgaaccccgtatcagctgatctggggacgctgacttttcctgcttctgctgctgctcagtcatcctacacctgtgcaggtgtctactttttattcagttttattttgtaagaaatatttgtcggagcctgctgtgtactgtcactggagagacaaaggtgaatcacacccggtccctgcctcacagagctccaggttatggaaggaacccactcaaagccagaccattaccattcagtgagaaacaccgtgacagacatcagcacaggtttctttgacccatctcaccaatgccttgtgaaaaatctcccactcttggttttctcaccaggttccacgcatacatgggatcatttctgagctgagatttcgtcatttcaagctcaaagtgaaaaagagaatgcaaatgtccccgatggtcctttgtgtggtcacagctgaacccgacatgtcctcctggctaatccagggtgctcagggctcccatttcactctgagcgtcctctctcctatcggagctcacatgtctgcacctgcagcagccaggtggctgcacactaacagaaaatccacaaagtcaggaaacttgatttattcccgtaactttgaggctagtgactttgtgacattgaactaatcttataacttccctgcactttaatttccatgtctgtaaagtggggcaggtggattcggtcaccctaggtgccactgtatagtgagaacttctcagagacagcagcacacctgatctcagcatccaccatctagcgaataccaggcacacactaggggctcaaagtctcactgaatgtatgtgtgaataaatgactatatgagagccatgtggatcatggacaaagtcaacaaatatttttgaacgtctaccaaatacactgtagaatagggaaataagtaacccaggcagggtggtgttttctcctaacttcccctgacctccttcctgggggagggagggcctctgtgcatcagacagactcttgacacagataatgttctcgagatgcattgtaagaagttatcatgttaacaagaggaaagtccatttgtcttgggggtgttttaatcaatggacctgagggacctgaagaccccccgatgagacacaggatgcgacacccaccccaagtgcatggaggggaaaccagatggagtgaactgacaggtagcgggacctgggagaacagagggataaagagactgaggcacctggaggaaggtctgaggaggagctcccggcccctgcggtggcctcggtgtggactgatgcagaactcagcagcataagtaagtaaagtggccgcaccaggctctatgcatacatgggaccatttttcagtaagattttctttctgctaatgggcttcacttttgcccactttctaacacatcaggacaagttaataggttacaaaccatcattccattcagcagtcatttatagaatactcccaaagtgccaggccctgtgtgagttcaggcaatacaaaaatgaacataaaagctcctgtcctctaagatccccatccaatgagctccagggagcacctctcctacaacacgcccctgctctgcacggccctcctctctgccctccaccaacccaaatcctcctccacctccagctcaagttccacccaaccaagtccctctcagtccccctccactcctgccactttgagagatgactgcactcatatctctaggttttatgaagtggatgtcatctccctggttagacttgagcttcctgaaggcagagaccatttttagaattttccagaaaaaaagccacatcagtaatttgcatcagaacaagcttagactctgctcaagccttcaacttagacagagactccactgcctagcacagtccctggtccctgcagtgctttataaaccctgcagtagcaaagtccacaatcaactcgtgtgtcagtcaacaggctgggataagttgaaaatgcagacagagaagaacagtcaaacaaaaatcaaagggctttgactcatgccttgcctcttcccttttctcagggaaacaaagtcacaccccctgctctcactcctgcctggaggcttccagggagggctcccttgttggccttcccttcagcccccatgaatatcacccagcattcaagcccagcctctcctctccctttgagcacattgcctaaagtctcaaataaatgtcaagtttagtgagtgctgatattctatgcccctaatgtttacttcaagtattattacctttcttcttttgcccggggccatttccaaacaagggctggagccaggcgccccagcagctgggcaaacacacttcagggctccttccctcctgtggctcctgtttctcaaaccctctgggacctgcagctctggggggtctcttcccccaacccagttccctcccctttagaccagaacaactaagccagacaatggaaaggaattgcgaacagagccggaacaaggcaactttccaggcaacaacgctactattgccaatattttgccaaggatgggagcaggagcacagaggggaagcagaccttttcaacatctcttctaccaatacatagcatccactttcctgccaaatactcagctagaaagggtcattgaaaggtataaggtgggactgggcgcagtggctcatgcctgtacccagcactttgggaggccgaggtgggcggatcacgaggtcaggagttcaagagcagcctggccaatgtggtgaaactccgtgtctactaaaaatacaaaaattagccaggtgtgggggcgtgtgcctgtaatctcagctactcgggaggctgaggcaggagaattgcttgaacccaggaggcggaggttgcagtgagctgagatggcaccatggcactccagcttaggcaacagagcaagactctgtcttgaaaaaaaaaagagaaagaaagaaagagagagagagaaagaaagaaggaaggaaggaagaaaggaaggaaggaaggaaggaaggaaggaaaagaaaaagaaagaaagaagaaagaaagaaagaaagaaagaaagaaagaaaagaaagaaagaaagaaagaaagaaagaaagaaagaaagaaagaaagaaagaaagaaaggtataagtctaatccgttacctaacagcaagacagcatcagttcactgcttttgccctcacatgaaaacagtgttgtgggactaaagcacagactggcaggtcatgtacactggcctcagccatccccagagatcaggagcctccgactgggaaccttccatacaatctccaagcgacgtacagctgcaccaacagtcacaattaaagttctaatctcagccaggtgtggtggttcacgcctgtaatcccagcactttgggaggctgaggtgggcagattatgaggtcaggagttcgacaccagcctgaccaaagtggtgaaatcccatctctactaaaaatacaaacattagccgggcgtggtggcgtgcacctgtaatcccagctactcaggaggctgaggcaggagaatcacttgaacccaggaggcggaggttgcagtgagccgagatcacgccactgcgctccagcctgggtgacagagtgagtctccatctcaaaaaaataaaataaaataaaaatagataaataaattctaatctcttccctccttctgttgctgccactaacgctgatgtccatggtctctagcagcctgaatccaggtaaataagactgtctgtgaagggaaaactggggggagaaaatgtggcaaaacaggccacacgtgcatcaaaatgtagccctttcagccacagaaattgggagcaagtgagcctttctcagtgccagtttcctcatttactaaaagaagcaaactgtacttacttccatggtcgcgagggttaaatgagatattgtatgtgacagtgtctgcaactacagccggcaaatatatatatatatacacactggttcaagaaagatttgcttccttgccttctcccccaagattttcccagaaaagtaatgcacttccccagggccaaacttggtggcagttgtgggaggatgttaaaggcaactgcacgttcattaaagttaaggaaatttttgctttcattccctttttgtaaagacaggatctcagtctatcacccacgcaggggtacagtggtgccatcatagctcactgcagcctcaaactcctgagctcaagcagtcttcctgccttggtctcgcaaatatatataaatagaagtgtaccccacatgcctggctaattttttttttctgtagagacggggtctcactgtgttgctcaggcagatctcaaactttgcttgtattctttttttttttttttttttgagacggagtctcactctgtctcccaggctggagtacagtggtgcaatcttggctcactacaacctccgcctcccgggttcaagcgattctcctgcctcagcctcctgagtagctgggattacaggtgcacaccaccatgcccagctaatttttgtatttttagtagagacggggtttcgccatgttggtcaggctggtctcgaactcctgactttgtgatccacctgcctcggcctcccagctgggattacaggcgtgagccaccgcacctggcccacttgtattctttagagtgtaccaagtatgcacacattttaatgctatttaatggtaatgtaataaactgaagaaaatcctatcaccagatagtgtccaactttgaagctttagtcacaccaagccctgctgcaacaacgcaccctttgggaagcagacctttggttaaaggttttgagtttactccagttttcactacaagcaaagtggcccagacctttgcaaagaaaccacctagaagagagctcaccccaccaggtgcagtggctcacacctgtaatcccagcactttgggaggccaaggcgggcagatgatttgaggtcagcaactcaggactagctgattaacatggtgaaaccacgtctctactaaaaatacaaaaaaattagccgagcatggtggcatatgcctgtagtcccagctacatgggaggctgagtcaggagaacagcttgaacccatgaggcagaggttgcagtgagccaagatcgcgcgccactgcacttcagcctgggcaacagagcaagactccatctcagagagagagagaaagagagagagctcaccccatgtatatttccacttgggagcatcatctttccaagggccactttgaggtgaaatggcttttttacatactcagcatcaatttggtcctaaaatcaggagacattcacccttctccaccccaatttccaacatcccctcctttgtagagagagcactctggaagccactgagccccatagccctagggcctagaccactattccaaaagggaagacttttccattactatgacagacacccaggctggagtcctctgcctgcactcaaagctctaaccccaacctctttttccagtgcaaacccttctactcactaaaaatttctctccactcaaactagcctgtttgcccttccctgaacggggcttgtgttttcccatcagctcaactttgctcacatgcccagctcaaaaccacatttccacaggccagacaagtgctcagttcttcccacacgtagatgagtgctctgcctcctgagagcctgcttagccctactggacactgtcttgttgcacttatcatctgctgccttatattgaaggccttcatatgcctctcctgcctccaccccctgcccttctaaatttcaaactccttggccgcacagactggtgcactgtttccatatccctcacgctatccagctcagcacttggcaaacattagctcaccacaagaatgcatcctcaggtttttaagtcagacaagggcttcatagcagttctattgacattggggatgaacagttccttgcggtgggggctgttctgtgcattgtgagacgctcagcagcatccacgtggcctctttccactagatgccaatagcagccttccctctctcccgtccccaccccggtatgaaaaccaaaaatgtctccaaacattgccaaatgtcccctgggcggaaaccaccctcagtccacaaccactactctataccaatagttctccacctggccacacattcagactcacctgaacatttacactcagcctggaagtcagggggacctagatccaaatcctagctctgtcactccctttgcaaccctgacaagtcgcttcacttttttttaccctgttttatcgtcttaagatgaataaatatcccttctcacaatcttgttgtgaagattaaatgatccgcagcgtgacctagaaagggtttaataaatggactgtgtagaatttctaagtcgctcctaaagcacgagggtgaggaactgcggaaagttctctgcgccgccaggaggcgccatcataaaccacgtcggtgggtggccgccaggctccagctttgtttcccagccaagcaaactttgcaatgtgggcctgagtctgagctacttcgtagctggaggaaatgacactcctcctcatcccccaaaataattctcaaaataaaatcgaatcttattttatcttttcatgacatacatgctcaatatgcttttcacaggggagagggaaaaaagaaatggatgagaatatatgaggatattatgaaagaaatcatattttatatgatttataatagatgactcattacttataatattacttgttaatcataaaattacttataataatagctgacatgttttaagaactcctgtgtctcaggcattgttctaagcacttcacatttatctcattttatcctcacagaaatcttatgcattttacatttttttacttttcatttttcagactttcaaaaatattgtaaaaatagtcagagttccagtatatccttcatccagctttttcaaataaccttaactctaaagcaattatcaaaatcagtcacctagcattgatacaaaaaattttaaaatatagaaatatggggccgggcacggtggctcacgcctttaatcccagtactttgggaggccaaggagggtagatcacgaggtgaggagatcgagaccatcctggctaacacgatgaaaccccgtctctactaaaaatacaaaaattagccaggcgtggtggcaggtacctgtaatcccagctactcgggaggctgaagcaggagaatctcttgaactcaggaggtgggggttgcagtgagcccagatcgagccactgcactccagccttggcgacagagtgagactctgtctccaaaaaaaaaaaaaagaaatattaaaattttgctaatcatcccagtcatgtcttttttctgctccagagtccaacccaggatcccacactgaataacactgtcacatttcctaggcctcctccaacctgggggagtttcccactctttccctctctcaggaccttgatgcttttgaggaggtctggtcagttgttttgtagaatgcccctcaatttgggtttgtctcatgtttccttgggatgtttcaggttatgcattttgggcaagattagcacagaagcgatgtgtctttctcaggacatcccagccggagccccaggatgtctatatctctcattaccgatgaggttcactttaagcgcttggttcaggtggtgtctgccaggtttctctactgtgaagttactattcatctcattgtaattaataagtatcttgtggacaggtactttggaaatatgcaaatagccagtttgttcttagcatacttttaccaattaatttctagaatccagagataattgtagccgataaacaattcttactgtggtgttagccagtgattttctgcttccatcattgcttctacactgattaactggaacgctgctgtaagaaagagctagttcttctttctcatttatttatgtattcacttatttatatatatatcagcatggactctcaagtatttatcggttggactacattactattattattgattatgttgctatattgtccccaaattggccattgggagcttcttctagttggcatttgtgatactttccacacatccccatcatttttcaagttgtgccttactctcaggccccgcaagatgctccagtctcctcttgtggtttcctgccccagccctggaatcagccatttctccagggaaccctggttcctttcatgggagaatgatgtttacagaccatgggcgcccatatgcccattgctagtaggtgccggtgcttctatgccctctagtggtcagagctgggaaataacacacccacactagtgtactgttacccacatttcacaaattaggtaaatgaggcacagaaaagttaggcaacttgaccaacatcacagagaaaataggtagtggaactgggaaatgaaaataatgacagatgcaccacaagttctaacaagcaaaagtagctttttcacacatccacatcagcagaaagccacaagcccaatattccggcgtagacactctttgaaaaccagaattccacagcaataaccacgatgacaaccaccatgtactcaacacccgcctgggcacggggctcccacagcagctcacttattcccaacaactctgcaaggaggattttaccatcctccttttacaaatcagggaatcaaggatcatagaagccacgtgacttgtccaagtcaacatagttaagtgacagaaccattagctgtccccaggtacatctggacataaagttcatgtttatgccactgtgtcagcatttccaaaaactgattttaggcgaaacgtaagtaagctttttaaaaactttaatacttatgcgtttattttaatatacattgagaaaacatttaagcacacatcaaatctgtaatttcatggacaatattgcataagacaaggatgttttgtctccaactcctggcctcaagccatcctcccaccatagcctctcgagtagctgggatcacagatctgagccaccgatccctgctaggacaggatgttttgtaaactaaatttatttagaaaaaaggatgaaatatataataataaaggtggtacaagctagagagaaaatcataaagtcagcctagaaatgtctggtgtctggatgacataaagctacagcactgtgaagcctcattctcagttactcccaggaaattagagtcacataatgctgcagaaagaacagctcagaatcttagatccgggctttagccctagatatatccatttgtaggaccccagacatctctgtgacctccttgctgggagtaaatccaaccttcccagacatgtgagaacagtaagaagaccctgcacacacaaaggagtttctccgtcacagagaaaataacaccaggttcagggaccccagggactctgcatggtgctgacagacccaaggccaaggcagagcagaggtccacgctggggagggagggtcatcctgttatgaaacagggatccaagtaagccttgcttctcagagcctggtctggggaactcaaatgtagacagaagggagaaaggaagaagagaaaatgaggcaaaactgagaggggaggggacagagaggtgacctgggcagagcttcacccatgaccctggaaagtgctcctgccctgggaggaggctcagcatggaaagaggaaggacagcagagcctaagtcacagtagccctgactacagcattcctggagcccaggctcttttccacagaggaggaaagagcaggcagcagagaccatggggcccccctcagcctctccccacagagaatgcatcccctggcaggggcttctgctcacaggtgagtggaggattcctgggagtgggcaagaggagggatcacagagaatggctggggtctcctggggaggatggggctctgataggggacagaaggcttctgctgaagcctcaggggagagaacatcagagagggacacgggtcacaacaagacaatcacattgaactgggattgataagagggaggaaaatccattgatcatgttttccaagttaatcattactggccactacaattagaaaatgataagaataagaattacatcagggtgatactttaaataaaaatataaccagggcactaaaacctgtctttgaccaccaaccacaagttgcaaaataaccaccactccttaactcatccaccagtatttgcaatcaaattttaggcactggcgtacaacaaatatcagacaagtctctgtgttcaaagagcttacactcttgcagagatgaagatagacacccaaagagatctagaatgtgagttcaggtgttgacaagagccctggagggaacagagcagaaaaaggtcagaaagggaagacccagggtctctagaggaggtgtcaggggagggatctcccaaggatgccctgatgtgagcaggatctgagggcagtggggagggagccatgcagacccctggggaaggggattccacacaggaaaatgccaaggttagaggtgctgaagaaagaaaggtcacgttactgaccttgaccaagtgggacacacatacactctccaaggctgaagggtgaagagactctctcaggacccagggccccatctttccatcccaatacatgggtcccaatattgactgatgctttctccctcctagcctcacttctaaacttctggaacccgcccaccactgccaagctcactattgaatccatgccgctcagtgtcgcagaggggaaggaggtgcttctacttgtccacaatctgccccagcatctttttggctacagctggtacaaaggggaaagagtggatggcaacagtctaattgtaggatatgtaataggaactcaacaagctaccccaggggccgcatacagcggtcgagagacaatatacaccaatgcatccctgctgatccagaatgtcacccagaatgacataggattctacaccctacaagtcataaagtcagatcttgtgaatgaagaagcaactggacagttccatgtataccgtgagtatttccacatgacctctgggtgttgggggtcagttctacttcccacatatgggattgtcaggcctgggctgtgcctgtggccctctctgcattacattctgtatcagggtttggacatttagtgcaggacacacacgggggagacaaacttccacagatcagaattcctttcctgcatccagaccctgcagacactcgctgcagaggaaggacagtctgatggggggactcagcagggcaaggtcagtgtcagaaaagaaccccatggtctccccatggacctgaccctaagaaagaccctggagaactggatcagggcctggcctgaggggtccccctaggattctcagagagaagctcaactcttcccagaactgagcccctgtgcaaatccctgtcccagattcctgactccaggtgaccctggggaccctagggatcctgtgccagggctgagtgaggcctcctgggcagggctgactgggagcaagaatttaccagctgtctgagggtcgtggctcctggagttggtcaccagccagggtccagccccaagaacctctcctgggcaaggacagggcctcatcctttacctgagactcagcatggagtgaacagatggacaagattactagggcatgagcccactgcccaggggaacttagatgactccatgggaagttcagtatccccagggggaggaaaaagaagagagaagatgctcccagcagctccttttccacaagggatcagactcagggacctctcttttggaggcaaataagcatagatgctgttcctttgggcagctcctctatacacagctgaggtcaagtaattgtaaatattttgagattaattcacaaacaacgtcacagccaaatagcacttatcctacttattgaaaaaaaaaattgaggaacagggagacagtcaccgactagggtcacacaagtcaaaggtgtcagattagagtcacacgaggtctctctgcagccacagctgcctcttctccaccaggggacggctggcgttattattagacatctgcaggcctgagaccagtcctaagttctctttcctttttcttgggcatccacatctcagagggggagattttggtctggagagtaaggggcaaatggaaaattaatcaatttttcctgatatagtttggatgtttatcctctccaaatctcatgttgaaatgtgatccccaacattggaggtgaggcctggtgggaggcgattggatcatggggggctgtttctcatgagtggctcagcaccatccccttggtgacaagtcagttctcactttgagtgcacaggagatctggttctttaaaagtgtgtggcgcctccacactctctcttgctcctgcttttgccacatgacaccacctgctcccccttctccttccaccatgattgtaagcttgctgggtctcaccagaagccgagcagacgctggtgccatgcctgtatagcctgcagatccctgcatcaattaaatctcttttctttataaattacccagcctcagacatttccttatagtaacaaaaaatagcctaacacattagcctaacctagaactaaatcccttgtgtcaacagagtcagtgccaggaatgtccgggcctccctctcagatgcgcaccactgccctcactcgacctgaaatcctgtgtttcctgatgtgtcagtgacactcccacaggaggataaaacactccccactcacaccctgcaccagcgcagggcccagtgagagacacacactcagtagttctctgacgaaggagggaaggaatgaatgatgaataattcttaaactcttcagagaccggatcttggatgcagaatcctataaggttctggccacacctgtttcctgtccctccaggggccgggatccttgttgcattcctctaacccctgcccctaaagctaccccaagaaccgcatctcatgggactctggcacagctcacctgtgggaaggttttcaggtctccctggtcctggtttgtgggcggcaggtcacccaggcgccgaggcaagagaccaaggacacgagctgttccagtataataaaatataaaacaagaaaagttataccagatatagatcttagatatgattatatgtgaatatcattaatcattagttggtagcaattactctttattccagtattataataatcctcgctctataatcacaacctaggaaaagccaggccatacagagataggagctggggagacatagtgagaagtgaccagaagacaagagtgcgagccttctgttatgcccagacagggccaccagaagggctccttggtctagcggtgacactagcgcctgggaagacgcccgttgccaggcagaccgaggtctagcggtagcgtaagtgtcaagggaaaacacccgctacttggcagaccgggaaagggagtctccctttccccgggagagtttagagaagactttgctcctccacctcttgtggagggccagacaccagtcaggtccactcgcagttatccggaggcctaaccgtctccctatgatgctgtgcttcagtggtcacgctcctagtccgccttcacgttccatcctgtacgcctggctctgccttctagatagcagtagtaaattagtgaaagtactaaaagtctctgatatgcagaaataatggcataagctgtctttctctttgtctcctctctctctctgcctcatctgccaggcagggaagggccccctgtccagtggacacatgacccacgtgaccttacctatcattggagatgactcacactctttaccctcccccttttgctttgtatccaataaataacagcgcagtcagacattcggggccactaccagtctccgcgcattggtggtagtgatccccccggggcccagctgtctgttcttttatctctttatcttgtgtcttcatttctacactctctcgtctccgcacatggggagagacccaccgaccctgtggggctggtccctacactggttctagaataaccaggggtctcctggtccctagggtctctgaggtcactgtagtccccacagctcactgtgatgtaatctctggctatctctgctaccccttgtcccttatcttcctcccctttcacaccagtgaggatgcccctgccctgcacagcttcctccacccttaggtcttccccaggaactccctctaacaagactggctgttctgttcccttcccactcacactgtggcctggcccacctccggggcaataaaaaaaggcacagaaatcagctggatcagagcccctgccaggcttcatcatgagccagtgtccccaggccaccaggagaacgagcttccactgtgtccccacccagggctctttcccttcttgaggccaacatgtggaaaaggccacaggacagggacgagcgactcctccacctactcttgtaatttcccagcaggtttttcctgccactgcacagacaaaaccaattcactgagaccacgatattgcagtcaagaaagagtttaattaatgctaagtaagccaaacagtaagacaagagtttattattacttaaatcagcctccctggaggcttgagattagagtttttcatggatagtttgatggcaggggactagggaatggggaaagctgattggttggggataaaatcatagggatgtggcaactgatcctggtgtgctgaaactgcctctgagtgggggccacaagaccactgaatcatgggtcacagtccaggtggagtcagtcagttgccagaatgcagaagtctgagaaacatctcaaaagaccaatctcaggttctacaatagtgatattatctatgggagcaattagggaagtcacaaatcttgtgaccctcccataatgctgatctcgtaatgtttcattagtttacaaaggcaatccctgacaaagaggaagttagttttagggagggactataatcatccttgcttcaaagttaaactatacactgaatttttcccatggttagcctggcttgtgcccaggaatgagcaaggacagccaccttgaggctagaagccagatgaagtcagccatgctagcttactctcgccatcttaatccttgcaaaagtggtttcactctctacaatgactcaccaggggtcagaggcaagaggagaggtctgcagtccccaaagctcatggctcatttcacccatttccctcccgactccaccctcattcagctatggggctcccatcctccagtcattccctagagacttctggtgtccaatttggcatgtaagaagcttgaaatctgtcactcagttataacaagtataaaactgaacaaactgaaaaatcaacaactcttttagatccctcagagaagctaggcctcggtgttaattgccccgcatattggagagaccgacaggcaaagatggagcagcacacctcacctgggcagaagcccagggacagaaaccctgcagaaccagcgctggggtcagaaatctgaactgtaactgacaaattgctggaggctcagcatggacatgccccagagttaaactaaacactccaggggagggatcaatcttggggctgggacaaggagggactcttttgtgagtcttaactcctagagctaccagattctcatagtgaataggcaacaaagatcccctcctccttcctgaagcgggagggggaaaggaattatttggaaagatctccgtgaattctattcttcttagcaacagctgcctttaagagaaacttttaccagagcctgacctgctggggttttatgggagcctaactggcctggcagtgggtaaatgtccaactccagccccctgtagccatcatgtcccacctaagggggcaaaaatacagagagtcacttatgaagttcacagcccaggctgcagacctcatccaggaccacagaacccttccctcccaacactcaccacagcgtcactgaacacctgctcacccaagttccttttacccagaatatcatgtctggctttcaacaaaactgcacaagacagactaaggcaaaaacaaaaaaaaatgcaatttgaaactcagaacaacaatcagaaccagactcagatgtggcagggatgttgaaattagcagaacgggaatttaaaacaactctggttaatacagtaaaggttatgatggaaaaagtagaccccatgcaggaacagatgggtgatgtaagcagagagatcgatattctaagacagaaccaaaagaaatgctagagataaaaaaagaaaccctcctgtaaggtaaatgaagaatgccctcaatgggcttactggtagcctggacacagctgaggaaagaatctctagcttgagggtgtgtcagtagaaacttccaaaactgaacagcaaagttttgtgtgtgtatgtgtgtgtgtgtgtgtgtgtgtgtgtgtgtgttgttttgtttgttttttttttttttgagacagagtctcgctctgtaccccaggctggagtgaagtgatgctatctcagctcactgcaagctctgcctcctgggttcacgccattctcctgcctcagcctcccaaatagctgggaccacaggcgcccgccaccatgcccggctaattttttgtatttttagtagagacggagtttcaccgtgttatccaggatggtctcgacctcccaacctcatgatctgcccgccttggcctccaaaagtgctgggattacaggcatgagccaccatgcccggcctgaaacagcaaagctttaaaagagtgggaaaaggccgggcgtggttgttcatgcttgtaatccctgcactttgggaggctgaggcgggtggatcacctgaggtcaggagttcgagaccagcctggccaacatgatgataccctgtctctactaaaaatacaaaaaattagccaggcatgatgacagatgcctataatcccagctactcaggaggctgaggcaagagaattgcttgaacctgggaggtagagattgtagtgagccaagatagcgcgatttcactccagcctgggcaacaagagcaaaactctgcctcaaaaaaaaaaaaagagtgggtaaaaaaagtggaaaagcagattcaacttcacattcaagattttgtattgacaatggcatattttatattttctaaaagctgtaacatacatgtaatgggaatactggtggttcctgggaccaggtggagctggccagccctgtgctgtctgatgggcccactgcttgttccacacacatgtgtccctcatgatgatgccattatcataagatggggtcttcgggtggggagatgcaccagccaccggcatctcacttagactctgcccaattcgggctaatttaatcaaattctagttgtgtttcctgaggcgtaaagaaaaggaggaaggtgtttcatatgcctgtttaggccccttcctattttgcctaactctgcacaggaaattgaggtgagggctcttttgacatttactgacatacacacatcacatctcctaatttggtatttttcttttctgtgtattattgagacatctcagactttccctctgaccagttctgtcttcctaacaggactcacaattctctctctacccagagagtcactgatttcaaaccaaagtcagcatctttctttgagcttaacatgattatgctggtcttcagcatttagcagacctaaaccttattatgttatcaagagaaatgctacagcaaccaattgacctcagacctttcgaccattaataataatttccactgatagaaaaaaaattaatttcccccaaatttcttttttttttttcactatagtgagatcataactcctttgtctaaactcctgacaaatttttaagggcaaaatggactattacagatggagaatcccaaatccaaaaatccaaaatacaaaatgtgccaatatccaaaattttttgaccactggcatgatgttcaaaggaaatgctcactggagcattttgaaattttagattttcagatttgggatgctaaaccgatacttgtaatacaaatattccaaaataaaaaataattagaaatccaaaacacttttgctcttatgcataagagatactcaaactctattaattatagacaccaagctgtacagcagatctctagaacctccatattttgcataattgaaactgcacacccaaggaacaactccctgccagcccttggaaatcaccactctgctcttttattcttttttcttcttttttttttttttttttttttttagatagagttttactcttgtcacccaggctggagtgcaatggtgtgatcttggctcactgcaacctccgcctcccaggttcaagcaattctccctagccttcttaagtagctgggattacaggcatgtgccaccacacctggctaatttttgtatttttagtagagacggggtttcaccatgttggccaggctggtctggaactcccgacctcaggtgatccgcccgcctcagcatcccaaaaggctgggattacaggcatgagccaccgcacccggtctgcattctactctctgattccatgagtttgactactctagggacctcgtattcgtggaaccgtacagtagttgtccttgtacgactgacttctttcacttaacataatctccaatgggagaaaatatttgcaaagattcttcccaaatgtctctctcatatccatcaaacacagagtccatgaggaccagattgccagcagcttcatgctccctctttccaccagtcagttctgcatttgcaaacgttcatatgtatttcttattaagttccacggagtcctcacctgccctctgcaggaggagaaaacacattaaggactgaggacagagaacatggttctgctccaaagccaccagctcctgcatgtccccgccctctttctaagttgggattctactcttcctgttgttgttgtttgttgttgttgttgttgttgttgtttgttgtttgttgttgttacggagtcttgctctgtcactcaggctggagtgcagtcgtgtaatctcggctcactacaacctctgcctcccaggttcaagtgattctccttcctcagcctcccgagtagctggaattacaggcatgctccaccacacccagctaatttttgtatttttagtagagactgggtttttcgccatgttggtcaggctggtctcgaactcctgacctcaggtgatctgcccacctcggcctccccaagtgctgggattacaggtgtgagccaccgcacccggccttctactataccttttactgactcactgtctcatgtcagtcaccatgatatacctggaaagaataacctcaccttgtaattctgagacctcagcaccagcatgttccaggtgaggaccccaaggtcagccaggcagtcagccatcagggaaggaacaggagaggtgccaggggatgtgactcctggtcctgtgtctgtccaacacccaatgctgctgcttaattcacagttgagaaagtctcttcttctttcacaggcaggcagcctcacagtctctgagccctcagacggtcatgcatctgtctgtgacacacacatctgtcttcgtctttttttgtttgtgtgtttgtttgtttgtttgcttgtttgttttgagagacagagtctcactctgtcgcccaggctggagtgcagtggtgcgatctcggctcactgcaagctctgcctcccgggttcacaccattctcctgcctcagcctcccaagtagctgggactacaggcgcctgccaccatgcctggctaattttttgtattttttagtagagacggggtttcaccgtgttagccaggatggtctcgatctcgtgacctcgtgatacgcccgcctcggcctcccaaagtgctgggattacaggcgtgagccaccgcacccggccttgtcttggtcttttaaggagtggagttggccaaagaataggagatgttgattctgattaaaatatgcctgtggaggaatcacaggtgccacacagggcaatcttctctctgttttctgcacagcggagctgcccaagccctccatctccagcaacaactccaaccccaaggaggacaaggatgctgtggccttcacctgtgaacctgagattcacagcacaacctgcctgtagtgggtaaatggtcagagcctcccggtcagttccaggctgcagctgtccaatgacaagaggaccctcactctactcagtgtcacaaggaatgacacaggaccctatgagtgtgaaataccgaacccagtgggtgccagctacagtgacccagtcacgctgaatgtcctctgtatcttctgttcctctgtggcccaggcttccagcccaaatccacacagccagaggccaggcctctcagtccctctcaagtccagggactcagactctcacccaggctggccatcacttcctgtcccaagcaaacctgggcagacccagccttgaccaagaataggaggggagaggctgctcctgtcctgggaggctcagggtccacagcctgtgatgggagaaacaggtgaatatctcagacccagactcagtggacagattgggtttcgttaggacttcaaggttgtgacttggctcacagggacactgtggctcttccacagaccaggagcttccccttccctttgatgatatcatctatgactttattctcgctactccagatggaccgggcattcccaccatttcccccccagactcctattaccatccaggggcaaatctcaacctctcctgccacatggcctctaacccacctgcacagtactcctggtttgtcagtggaatgctccagcaacacacacaaaagctctttatccccaacatcgcagtggataagagtggatcctatgcttgcctcgcccataactcagccactggcctcagtacaatcacagtcaagacaatcacagtctctgctaagtggatccctggagcataggccctgagccctgggtaaagccactcagttttctgaaagagcctagaagtttatttcccagcccatgtcttggacacaagcaaatcccaaactctaccctgagccctctcactccacctctgcaggacccctcctccccttgttgttctgatttctcacagctgaccttggggccagcctggaatgttgtacaaattttgttttatcacttacgagttctgtgaccttccttgacttactgaggtgctttaagtctcagattctaactctgcagctgggggtgatgccccctctccctcaaggtgatgtaaggatgagatgagttgtaggtaggttggtgcccactggaactggcacatggaaggcccctgaaaacagtcaatgaacatcatccctgcttatcagcattgagttgatgccaagggcctgccctttgtgagtgtcatgggatggaaaaggagaaacagagggaagaggcatgatgcgagaggaaggagggactaaaaggcacaggagcagggtgaggtgcaggcacctctgggacaatgtatgagttggtgccgcccagtgtgtcaagcctgcagaaaatggtgccaccatggaaagcaagggaatctgtgatgaggacaacacaagagactacactcaggccccatggcatctccttcttccctgactgcacaccttccctgcaaggcccctgtggtttcctctgggatagacttgggcctctatcccctttgccttcttctttctgcagaagaaaatgccccaggccttcctgtgggggccgtcgccggcatcgtgaccggggtcctggtcggagtggcgctggtggccgcgctggtgtgtttcctgctccttgccaaaactggaaggtaccacagctttttcccatccttctcccaccccctaggctgactccaggccaaaagaaaggagaccttgtcctgtattcagggccaggctctccacggcctcccaagtccccagggatccttccctcttattccacggctcctccctcgtcagctcctgaccctgggttgctgcctcaacagcttcctcctctgtgaatttggcccaattaaggccccacccctgagtgtggccctagttccctcacacagcaaagccacagctgcctggagggagggagagaaggagggagggaagtagggagggagggagggagggcgtgctctgtacttggtacctcccattgttcattgaatccatccacacagtgagggggatttgcaggctccggatcctgggcaccgtcacacaatggggagtggaccagcctggacaggctgggtggggtcagtgccccccatggctgatgtggtaaccataggccctgaggtgtgagatgggagaacctgggcctcagaacagcatgtcctggagcgtcctttgtgtctcttgccaaggggttgagagagaggacaaggacactgtcccatttcagcatcaccagccctgagtgcagggtctggccacagcagggacactgagttccaggagaatccaagacacttgcggtcccctccgtgtcctgcacacgtggccctgctttgcctctggggacttgacccttcctctcaggcaaaccctcgtggtctgtttccttccttgggtcctcagtccctttcctgggtccctgggtcaatgttctcctggcccggcatctgcctgagggtccttcccctctgctcaggacagatgtgggttcctaaagcctttcctcaactcccctctgctgggctccccctaacacaaacctgagggagacaggaggtctccatgcccatccttgaaaatgggtttcccttcttgtcccctgttcgaactccaaagttgtggcttttaacctggcaccctcccaaatgaccctgacctttcctagaaccagcatccagcgtgacctcaaggagcagcagccccaagcccttgcccctggtgagtgtcctctcagcccaggtgtggctgggaacccctaggacagccccacagtgtccgctcctgccagtcactgccaggcagactctgatcctttcccgggggctgcaaggaggatctcataaaacatcacacaggggaccccaattgcttgggtcagccctcacctgtgggctctgggtcatgggtcacctccccaacctcagctgctcaggtatcttagagctgaggaccccctacgccttcctggagaggggataaggctctcctcccaccctgctgctcactcctgtctctgtttccaggccgtggtccctcccacagctctgccttctcggtaagcctgtccccttccagcccctttctactggggtcccagctgtgcaggctctgggcagagggaccatcagccccccagcacagaacagacccaccttcccccaaaacacacaggacaaggctagccctgccctggccaggagctgggcctccctacagggtcaggaccacccacgccctgtgctgacccctccccgggaccctccatcacctgaggagacccctggagtgcagcaggtgcagagtggacactgggaccatcagtcaggggcccacattaacaagggtgcagggtgggcccagccaggaaaagggtcagggtgctgtgtccacactgggaggctgagctcaggggcagagctggtcactcctgaggggaaatgaccagaagtaaacacagagaagtaaatcctggccaatcagagacaggaaacttccaggctgggcctccatgaccctccctccctgtccacagatgtcccctctctccactgcccaggcccccctacccaaccccaggacagcagcttccatctatgaggtgagtgtgggccacggatgttctggtcccacaggccccaggggacccaggatcttcccctactggcatcggctgagctctgagattcaggaaactgctgtgaaaataagaacgggggtggcgagcagaggagggaggggcttgggagcaggaaccccctgagcacagccaggttcagccccagagcagccctggatgggcccagagcctgggagacgccacaccctgttctgaggagactagaggggtccaggcctcttctctgttttaacaggaattgctaaaacatgacacaaacatttactgccggatggaccacaaagcagaagtggcttcttagcttcctccaggagctgctcctgtgtgttgatggagagtccccaaggcccccagccctggggatggggaaggacatgaagcctgagccagagaaccagctataagtcctgagaagacactggtgtctgggggcagggagggatgggggtccctgatgaatatctggagacctcgacagcctgccctaggccctgggtgggtcaggacaaaggcctctcatcaccgcagaaagcgggggcttgcagggaaagtgaatgggcctgtggcccacctggggtcacttggaaaggatctgaataaaggggacccttcctctcattagctgtttttctgctagtgggaacttagcaaaaattcgcctgaaactccatatccattctctcctgggtcacacaaggaaaatgtcatctccaacttatttcaaccccagtctctcttccctgggaggcagaaatagggggttgggagtcaggctggggtggaccctacacaggaaagggcaggattcacaggagacctgcccagccagctgagcgcttggctgtgctcatactgccccagggacccacggtgcctagccctggccactgggtttcttctctgtccaaaaggccagtgctcaggacatctttacccatatcaggggacacacagagggcctgtcagagtaatcaaggtgaggacagacccagaatttagtcctggagtaaaatcctcccagacactacctgggactctagcccatcatttcccatcagttcccactttaccccctggagtggatctcactgaacaatcctccactccacacaggagattccaggtcagagacacagggctctctcacctaaagctcacgcagtctaccatggcaatgggacaacctctctcctcttctccctggcctgcagggccctccactcaggcctcaccagcagctccaccacatacctgggccggcagttctctgtccctcctgagggccctggggagtgtaatgatctcatgtaggttcactcagaccaggtgtccccttcccacaatcaggctggtccctgcactaaagcacagagccacggttcctgagggtattctgccactgcccagggttgtttgccatgagatgggaagtaggaaaaacaacctgcaaatttacatcaggatttagctctaaatgactccttacctcacttgtacacatcgtcagatgagacaaggtgatgtctcttgtgtcagtttcctgttgatgctgtgacaaattcccacaggccaggcatgttggtttgtgtcttggtcccacttactcaagaggctgaggcaggaggatcgcttgagcccaggaggttgaggctgcagtgagctctgatcacaccactgcacgctggcctaggcaacagagatgacaactccattgttaacttagtggcataaaacaacaacgtgtccacttggctgtgttcttcctggcagctccagggaaaagtctgttccctcaccttttccaattactagaggccgcctgcatccttaactttggccccttcctccatcttcaaagcgagcagtacagcatcttgaaacctctctgtgctctgcttccatcctcactgacttccccgcctccctgtctcacttgtatggttattttggacccacctggataaaccacaataatctccccatctcatcatccttcatttatctgctaagtgtctttgaccatgtgccatattcacagatcttgggatgaggatgtgtgcatctttgagaggggcttgttctatccatctctcctctcaaggccattttatcatgattgttcactacaaagtacacatgggcacctggatagggttatcctgactgtggcatcagtttttgcagtgacgtcccagcaccctccaggtcctgagagagggagacggagggctctccatgcccctagtacctctccaccttctcctcggtgacaagcttagttgttaagaataaaagagatgtgtctgggcgtggtggctcacacctgtaatcccagcactttgggaggccgaggcaggcagatcacctgaggtcaggagttcgagaccagcctgaccaacatggcgaaaccctggctctactaaaattacaaaaattagctgcacgtgctggcgcacgcccataatcccagctactctggaggctgaggcaggagaatcacttgaacctgggaggtggaggttgctgtgagccaaaataatgccactgcactccagcctgggtgacagagtgagactccatctcaaaaaaaaaaaaaaaaaaaaaaaaagaaaagaaaagaaaagaaaaacaaagaataaaagagatgtgactggaagatcacaactcaccagcccttcaatcgttcatggacatcagcaccatggatagtgaccacggaagggtcatccccaggcactgcagcagggagcgcacagatggaaagaaactgccgggaaaagctgcccagtctattctgcctgagaaagacacaatgagggagaacctgattcttctctaatttatttgttgtgagccctgtgcacatgactaaatgttagggttgttggcaaaggttgttgacgcccctggcagggctgatttctgtacccaaagtatgaccttggagaggctgagtctgctctggtttcccagtgaatgtccctacctctgagactcaagccattgtctctgcctacaacacagtgggaacttttcatgattaacttccgacccccgtgcctgaccttggaaccactaccatcacccagcctggagcactgcctgagcacagcatcctgttccctgagctccagctaagcccctgggaagctgagctgaaccgagcccctgaacaatcctctcagtgactccaggccaggcctcgtgccccatgtcagaggcctttgccatctgccagtccttcccacacaatcctcctgagggacaagtggaggcctgaacatctgtctcccagggtagggcccaacttctccaggagacaaaaacagaccagagtcctcccagtcaccctcaccctcctcattcccaccacttcccacccacagaggcaactctggtcctacagacccacccctgcccttcccaagagctcaggtccagtcaatcagtgtccctgcaggtcacacacacacaccactcagagtgctcagtggaagggtcactcaggtccccaccgagagtctcccgtgctttggatgggtcagaatcctcttcacatcccacatctgggcagtcaacaaggtcttctctgcactgtcctcgcacctacagtgtctgtcttggtcatcctcgtcatcttttctgagcacggccacagctcctaacaagtggggttaaggctcctgacagatagggttaaggcataggaccgtgattctgagggcttctcaggtcttgcctgttatgtgaaattagcatgtacaacacatagaatttgtatgtttacctcataattttaatgtgcacaccctttgatcattaattagtcacattaagaagagcctcccctgaatcgtgagttctaaggaggcaggagtacacctgtcctggtctctgctaagtccagtgacaagcacccagtctggcacaaggatgcttcataaatacatgtggaataaatgagatcctcttacaccctgctcacttccctgacttatgtgaccagacggaaactcctaatgtacaggagagaaaggcagaaatgctggagaccagcgagaaagctgttttttgaaagagcagcaagttccaggcctctaaagatacttctggactttacgtggtgcagagaaaaagacaaaaccaatacattcccttcaaaccactaaagtgggtggggccatagcctaactgagaaagaaaaagaccaaggtagggtacagttcccctaacccactttgtttccagacatcaaaaaatacagtttgtggtcttggactctgatgtggaaaaagtacaaaccaaaaattgtgttaccactaatttccttgctatgagcagtcatgaaatatcaatgtacaaccatacatgcaaagatacaaattcaaacagcacttcagtgaacattcacaggaccagtgtcagaggtctgcaaactaactacatttgttttaactttgaatttttaaataattgtagattcacagaaacttgaaaaaaaatgtacttggaggcccatcacccttcacccagcctccaccaatgttcacattttgcataactataattcaatgtcaaaaccaggaaagcgacattggtacaatctgcagagcttttttcatatttcaccagttatacatgcatgtgtgcgtgcatacatgtgtgcatttgtgtgtgggtgtggatgtgcacgtgtgtgtctctatgctatgcggctaccacagtcacaacatcatatgttgccaccccttcataaccacaataccctccctgtcccataactacttctggcaagcactaatctagtctacatctctatggttatgttatttcaagaatgttacataaatggaattgtacagtatgtatgttttttttttgtttttttttgtttgtttgtttgttttttggagatagagtcttgctctgtcgcccaggctggagtgcagtggcatgatcttggctcactgcaacctctgcctcccggttttaagcaattatcttgcctcagcctcccaagtagctgggattacagggattacagacgtgcgccaccacacccaggtaatttttgtggttggctggttggtttgtttgtttgtttgtttggagacagagttccgctcttattgcccgggctggagtgcaaaggcgcaatctctactcatcacaacctctgcctcccgggttcaagcgattctcctgcctcagcctcctgagtagctgggattacaggcatgcgccaccacgcccggctaatttttgtatttttagtacagacggggtttctccatgttggtcaggctggtcttgaacccccgaccttaggtgatctgcccgccttggcctcccaaagtgctgggattacaggtgtgagccaccttgcacagccttgtttttttcttttttaagtagagacggtatttcaccactttggtgaactggtctcgaactcctgacctcaggggatccacctgccttggtctcccaaagtgctgggattacagggttgagctaccacgcccagccatcatgcagtaggtatgcttttggtttttttgctttttgttttttgtttttgctcttgttgcccaggctggagtgcagtggtgcaatcttggctcactgcaacctccacctcccaggttcaagtgattctcctgcctcagcctcccaagtagctgggattacgggcatgcgccacaacgcccggctaatttttgtacttttttagtagagacggggtttcaccatgttggccaggctggtctcgaactcctgacctcaggtgatccacctgcctcgacctctcaaagtactgggattacaggcatgagccaccgcaccaggccagtatgtatgcttttgatattggctttgttctatcagcaaactttccttgagcttcatccaagttgttgcaagtatcaagagttactcctttttattgctcaggggtggtatttcatagtactgcaatttaatcattcacccattgaaggacattgaattcctttttagtccttggctattgcaaataaagacactatgaacattcacgtacaagtttccatgtgaaaatacttttttcctttctctgggaagaatgcccaagagtacaatagttaagtcaggtgacaagcccattttaagttttaaaaaaaattgccaaagtattttccagaatgactggagccagcatgcatgagtgcaccagcagtgtatgagtgattcagcttatctgcatcctctccagcatttggtgttattattatttatggtaccccttctattaggtgtataatgatatttcattgtggttttaacttgcttttattttcttttttttttttttactggagacatagtctcattctgtcacccaggctggagtgcagtgatgctggcccactgcaacctccacctcctggattcaagcaattctcctgcctcagcctcccaagtagctgggattacaggtgtgtaccactacgcgcagctaattttgtagttttagtagagacggggtttcaccatgttagccaggccggtctcaaactcccaacctcaggttatccgccctcctcggcctcccaacttgcatttttaatggctaataatgttgagcatcttttcatgtgtttatctgcatattctttttgctgaaatatctatgcgggtcttttcctttttttttttttttttttttttttttttttgaggagtcttactcctgcccaggctggaatgcagtggcatgatcttggctcactgcaacctccacctcccggattcaagccattctcctgcctcagcctccctcgtggctgggattacaggtgcgtgccaccacgcctagctaattttagtatttttagtagagaaggggtttcaccgtgttggccaggctggtctcgaactcctaacttcaagtgatccatccacctcatcctcccaaagtgctgggattacaggcgtgagccaccatgcccagcctcttttcacattttctaattggattttttttttttttttttcttgagacggagtctcactctgtcacccaggctggagtgcagtggtgtgatctcggctcactgcaagctccgcctcctgggttcaggccattctcctgcctcagcctcccgagtagctgggactacaggcgcccaccatcacacctggctaattttttgtatttttagtagaaacagggtttcaccgtgttagccaggatggtctcgatcttcctgtgatctgcccgcctctgcctcccaaagtgcttgggaggtaccttgtgatccacccacctcggcctcccaaagtgctgggattacaggcatgagcctccacgcccagcctctaactggattttttaatgttgagttttgagcattctttatgtattctagacacaactccttggctggatatctgatttgcaaatattttctcccaatctgtatttgtcttctttttctcttaacaaggtctttcacagagcagaagattttaactttgatttaaaaattcatcagtatttcttttatggatcgcattttgggtgtcaagtctaagaactctcttctttcactttgtcgaaaattaacgcacatacctgtgcacacctatttctaagtcccctattctctcccattgatatatgtgtctatccctcaatcagtcccatgttgtcttgattactataactatatagcaagccttatgaggaagagtgatttttcccatcttattattccttttccaaatgattttggctattttagggcctttccttttccatataaattttagagtaagcttatctaggtctatgaaaaaaaattgctgacatttagctaggaattgcattaatgtagatcaatttagggacaatgaacatctttactgtcttgagtcgtccaattcatgaacacatgtctctccaagtatttagttctcctttgatttcgttcatcggcattttgtaatttttatcatatagttcctgtacatgttttggtagagttatgtccgagtatttcattttctctggagcaattgtaagtggtactaggtttttattttggtttccactagttcattgtctgtatacaaaaatgcaattgaattttgcatgttgatcttgtatcttgtgactttattgaactcacttattagttctaaaagatacgtttttgtaaattcctggagatcttttacatagataatcaagtcatcttcaaatagagacagttttatttattattttcttcttcttttttacttttcgagacaggatctcactctgtagcccaggctggagtgcagtggcacaatctctgctcactgcagtctcaacctcccaggctgaagcaatcctcctacctcagcttcctgagtagctgaaactacaggcacatgccacagtgcctggcttttttttgtttttatttttgttttctttttttttttaagacggcgtctcactctgtcaccctggctggagtgcaatggcgtgatttaggctcactacaagctccgcttcccggattcacgccattctcctgcctcagcttcccgagtagctgggactacaggcgtctgccaccacatccggctaattttttgtatttttagtagagatggggtttcaccgtatcagccaggatggtctcgatctcctgacctcatgatccaccctcctcggcctcccaaagtgctgggagtacaggcgtgagccaccatgccaggccgcctggcttttttttgtagagatgggatctcattatgttgcccaggctggtttcagactcctgagcccaagcaatccactcacctcggctctccaaacatctgggaccgcacccaggcatgcaccactgcacccagcctatttcttactttctttcttttttttttttttttgagacacagtcttgctcttgtcacccaggctaaagttcaatggcacgatcttggctcactgcaacctccacctcccaggttcaagcaattctcctgcctcagcctcccaagtagctgggattacaggcgcccaccaccatgcctggctaatttttgtatttttagtagagacagggtttcgccttgttggccaggctggtcttgaactcctgacctcaggtgatctgcccgcttcagcctcccaaagtgctgggattacagctgtgagccaccgcacctggccctatttcttactttctagtccatatgtatttatttccttttcttgccttattccagtgctgaaacttccagtagtatattgaataaggatgatgagagtgggcacccttgcccttttcttagtattagagggaaaacattcagtcttacaccattgaaagtgcaaccaggcatggtggctcacacctgtaatcccagcactttgagcggccaagttgggcagataacttgaggtgaggagttcgagaccagcctggccaacatggtgaaacaccatctctaccaaaaatacaaaaaaaaaaaaaaaaatagtcgagtgtgctggcctgcacctgtagtcccagctactcaggaggctgaggcaggagaatcacctgaacctgaaaggaggaggttgcagtaagtggagatggtgccactgcattccagcctgggtgacagagcaacccctatctcaaaaacaaaaaaatttttaaggaatgatgttaaatgacagaagatgagaaagacagcagagtaagtctctccagccattatctcccagcagaaacatccatttgagcaactatccacacacaaaattactttcacaagagccaaaaaaaaaaaaaaaactcgaacacacgagtgaagctgggaagcgcccttggaccacaaagacaagcaaaaccacggttggaaggtaaagggatcagttctctgtgcttgcaacatgcctcccctcaagccattatggcaccacacgtggaaactccccatggacccatgatttttacactggaaaaactgagctaggggtggacatacagattccccatcattccgggcccctccacaaaagactcactcctgtattggcccatagagaacactgcaagtacctaaggccagttaaagacaaaaagaaggggtggggttgggcagccactgcaaggaatttggcagtggctctccatccctgccagaggagatgctgcaccaaagacactgtttacagaaaccatgctgcaggaagcatggtccacagatcctctggccttgagggcctggctggttctccacagggcccaggtgccctctgtggctctcccacctgccccatccaggtccgacatttcatcagcagtgaagctagtgccagactcgcctctaacctgggcttagggtaccccctagtgttgaaatggaagacaacagtcagtccactcacaatttctaaataagcccactgaaatagaatggtcacaaacaaactcaggctgtaaagaccgtaataaacacctaattcaccaatgcatagatagagacgcagatctaggaataagaatagcctaggaacgtgcctcgtcaaatagacagaacaaaatgccaatgaattatcctaaaaacatgcaaatgaatggtctggcaggcaaagaattcaaaacggctgttttaagaaaactcagagaacttaaagaaaacatagagaaacaattcagacgtttgtcagagaaatgtaacagcgaaagtaaaataataagaaacaaacagaaaccttgaagctgagaagtacaatatgaaatgaaaaatgtgccgggcgcggtggctcatgcctgtaatcccagcactctgggaggccgaggcggacggatcacggggtcaggagatcgagaccatcctggataacacggtgaaaccccgtctctactaaaaatacaaaaaattagccgggcgtggtggcgggagcctgtagtcccagctactcgggaggctgaggcaggagaatggcgtgaacccgggaggcggagcttgcagtgagccgagatcgggccattgcactccagcctgggcgacaaagcaagactccgtctcaaaaaaaaaaaaaaaaatgtgtcgggcatagtgctgcatgactatagtctcagttattcaggagaatgaagtgagaggatcacttgagtccaggagtttgagaccaacctgctcaatatagtgagacccccgtctctgaaaaaataaaaaatgtactgtgttcatggactggaagaattaatattgttaaaatgtccatactaaccatgatgaactacaaattcaactcagtctctagcaatatttcaatggcattcttcacagaagtagaaatataggccattcgcagtggctcgcgcctgtaatttcagcactttgggaggccacagtgggtggatcacttgaggccaggagttaaactacactgaccaacctggccaatcccatctgtactaaaatacaaaaattagccaggcacggtggtgcatgcctgtaaccccagctactcaagagggtgaggcaagagaattgcttgaacatgggaggccgagtttgtagtgagccaagatggcgccactgtactccaccctgggcaacacagcaagactctgtctcaaaaaaaagaaaaaagaaaaatgctcccaatactctgggaggccgaagcaggtggattacctgatgtcaggagttcgagaccagcctggccaacatggtgaaaccccatttctactaaaaacacaaaaatgtgctgggtgtggtggtgtgcacctataatcccagctacctaggaggctgaggctggagaaattttttatttccttattaatttcttcatttacccattggtggctcagtagtatgttgtttaatttccatgtgctggtgtgttttctgggattcctctcattattaatttctagttttatacccctgtggtaagaaaaatatacttacgccctgcctggtggctcacgcctataatctcaacactttgggaagccaagatgggaagatcacttgaggccaggagttcaagaccagcctgaacaacatagtgagattccatctccacaaaagtaaaaaaaaaaattagctgggcattgtggggcactcctgtaaccccagctatctggggggctgagcgaggaggatcatttgagcccaggagttggaggctgcagtgaactatgatctcaccactgcactccagcctgggcaacagagtaagaccctatctcttttaaaaaaagaaaagatacttaataagattcctacttttttgaatttattgagacttggtttgtggcctaagatatagtctactctggagaatgttccatgtgctgatggaaagaatatctattctgcagcagttgggtgaaatgttctgtaaatatcaggcctgtttggtctaaaatgtagtttaactccaatgtttctttgttgattttctgtctgggtgatctgtccattattgacagtggggtgtcgaagtccccagctattattgtattgcagtctatctctccctttagatctattaatgtttgttttatacactttggtgctccagtgttgagtacataaatatttataatttttatatcttctcactacattgacccctttagcgttatatagtgaccttctttctctcttttgatagtctttggcttgtagtctattttatctgatataagtacagtttcttatgatctagcaatcccactactgggcatttatccaaaggaaaggaaattatactgaagagacatctacaccttcatgtttattgcagcactattcacaatagctaagataaaaaatcaacctaggtttccaacaacagataaatggataaagaaaatgtggtatatacataaaccatggaatacattcagccttaaaaaaaaagaataaaatcctgtcttttggagcaacatggtggaactggaggacattaagtaaaataagccatgaacagaaggtaaaaccccacatgttctcattcatacgtagaagctttaaaaaaagttgatctcatagaagtaaaaagtagaacagagaatactagaggatgggaagggaggaatggaaagcaatttgttaaaggatacagaattatagctggataagaggaataagttctagtgctctataccaccgtaggatgactatatttaacaataatatattatatagtttcaagtggctaggaggatgttgaacattcccaacacaaagaaatgataaatgcttgagatgataggtatgctgattgccctgatccaatcactataaattgtgtgtatcaaagcatcactatgtaccccatgactatgtacaattgttatttgtcaattaaaaataaaatacaatgtttaaaaaataaaaataagtattgctactcctacacttttttggtttccacttgcgtggaattttttttccatcccttcactttcagtctacgtgtgtctttataggtgaagtgggcttgttgtaggcagtatgtagttgggtcttgtttctttatccctttagccaccctttttttttttttttttgagacagagtctcgctttgttgcccaggctggagtatagtggcgcgatcttagctccctgcaagctctgcctcctgggttcacgccattctcctgccttagcttcccaagtagctgggactacaggcgcccgccaccttgccggctaattttttgtatttttagtagagacggggtctcaccgtattagccaggatggtctcgatctcctgacctcgtgatctgcccgcctcggcctcccaaagtgctgggattacaggcgtgagacaccgctcccagcccattctgtgtcttttaaatggagaattgcatccattaacattcacatgattattaatcagtactgcagttttgttgcttgttttctggttgttttgcaactccctcttctttttctttctttcctattgtcttcctttgtagttaagtgattttctctggtagtatgttttaagtcatttatctttaagtgaatatattataggttttggcattatgattaccttgagctttacaaaaaacatcttatggattataacaaattaacttaaggagatgacaacttatcttagatcataaagaacagaaatgaagaaagcaggaaaaaatactctagactttaactcccttcccccaccccctacattttgactttatgttgtctcaatttacatatttttatatcgcctatctcttaacagtttgctgtagctattatgttcttgatatttttgtcttttgggcttcatactagagttattagtggattttacaccacagtgatagtttagagtacatattcatgtacttaattttatcagtgatttttacacctttaagtgttttctttttacatgttagtgttttttctttccaattgaagaaccgctttagcatttcttgtaagatgagtctgctggtggtgaattttctcagctgttgtttgtctggaagaaactttctctctccttcgtatttgtagggtggctttgctggatacagtgttcttggagagcaggggtttctaccttcagcactttgaatatgccatcccacccctacctggcctgtatgatttccactaagaagtctgttgcttggccgagtgtgttggctccatgcctgtaatcccagcactttgggaggccgaggcgggtggatcacctgacgtcaggagttcgagactagcctggccaacatggaaaaaccctgtctctaccaaaaatacaaaaattagctgggcgtggttgtgcacacctgtaatcccagctactcgggaggctgagacaggagaatcgtttgaacccaggaggcggaggttgcagtgagccgagattgtaccactggactccagcctgagtgacagagtgagattctgtcaaaaaaaaaaaaaatctgttgccaaattggaactcctttgaatattatttgcttattttctcctgctgcttttaggattctctcttcgtccttgacctttgcaagtttattatatgccgtaggatagtcatatttgggtcaaatctgtttggtgttctctgaccttgttgtacctaaatacttatctttttctagttttgaaagttttctgttttatttctttgaataagctttctacctcttgctcttccccaactccctcttaaacattaataatttttagatttggtttggagcattttttttcttttttttttctttttttttttttttagacagaatctcactctgtcaccaggctgcagtgcagtagcatgatctctgctcactgcaacaaatttttttgtatttttagtagagacagggtttcaccatgttggccaggctaatctcaagctcctgacctcaagtgatccacccacctcagcctcccaaagttgggattacaggcaggagccaccacacccggccagatttggtcttttgaggtaattttctatatcttgtaggtgatcatcattcttgttcattcttttttttctcctctgtgtattttcaaaaagcctgtgtttgagctcactgattcttttctctgcttgatccattctgctgttgagagactttaataaatttttcagttcagcaaatgtatttctcagttccaagatctcttttttgtttttttgtttgtttgtttgtttgtttttgagacaatgtctcactctgttccctaggttgtagtacagtggcatgatcatggctcactgcagcctcgacatcctgggctcaagtgatcctcccgcctgagcctcccaagtagctgggaccacaagcacacaccaccatgcctggttaattttttggttttttgtagagacagggttttgccatgttgcccaggctggtctcgaaatcctgagctcaagcaatccacctgccttggcctccaaaagtgcagagattacagtgtaagccaccatgcacagccagttctgagatttttgtttgtttgttttatttcaatatgtttgttaaatcactgagtttccttaaaactgctcttttgaattcttggtcagagagctcacatactgtagtctccttagggtcagtcactgattccctactttgtccaattggggaagtcatgattccctgtttgctgttgtttcttgtggatttacatctatgtctttgcattaaataattatgtattccagtcctgtctggatggcttgttttggttttcattagatgtatttgcttagagattctttgtaatttgtctgttgattttttttcctactaggttgctgcctcttttttggcagtaaatgatgccttaacccctggtttgccttggttctagtaaacaatcagagccaggcatggtggctcacacctgtaatcccagctactcaggaggctgaggtgggaggatcacttaagcccaaaagttcaagaccagcctggggaacataacaagactctgtctcaaaacaaaaacaaaacaaaacaaaacaaaacgccaggcacggtggctcacacctgtaatcccagcactttgggaggccaaggcaggcggatcacctgaggtcgggagttagtgaccagcctgaccaacatggagaaaccccgtctctactaaaaatacaaaattagccaggcatggtggtgcatgcctgtaatcccagctactcgggaagctgaggcaggagaatcgtttgaacctgggaggtggagattgtggtgatctgagatcgtgccattgcactccagcctgggcaacaagaacaaaactccatctcaaaaaaaaaaaaaaaaaatcaaagcgttgtccatcccaaatgagagaagtcccaaagggtcctggtagtgtgggaaggctggataagcagtttgtgctcaggacagctgtggaaggaacctgctatagcatagtgctgctgaaaagccactcatatttggtgtctcatttagccaaattgcagcgcagagtttccagaactgaagatggtagtgcagactcccccacccttgtctctgcctatcctcagggatatttctccctccaagcactctctgtgctttctgtggattgagaaagggtcaggtttcctgtcaggaaacccaagataatggggaggctatttgtccgtctccatctcacttttttcagtataaaaaccatgagtctagggaaattttctgtacacttggagcctggcagactcgggggaagggcatcatggatatggatttttttttaaattgcaagggtgagtcttacgtgtttacaaacaaaattatatgatttctgatatttaacccagggggtgaaagagtagatgagtatagatacaataaaatttgtcatgagtgtatatatatatatattttcgagatggaatctcgcttgttgcccaggctgcagtgcagtggtacaatctcagctcactgcaacctccaccttctgggttcaagcgattcttctgcctcagcctcctaagtagctgggactacaagtacatgccaccaagcctggctaatttttattgtatttttagtagagatagggtttcaccatattggccaggctggtcttgaacttctgacctcaagggatctgcctgcctgggcctcccaaagtactaaaattacaggtgtgagccatcacacccagcccatgagttgatatttttgaaactgttgatgggtacatgggcgttcactatacctttctcttcagtataataaactagagtttgtgggacaggcggagtggctcacgcctgtaatcccagcactttaggaggccgaggcgggtggatcacaaggtgaggagatggagaccatcttggctaacatggtgaaaccccgcctctactaaaaatacaaaaaaaattagccaggcgtggtggcgggcgcctgtagtcccagccacttgggaggctgaggcaggagaacggcatgaacctgggaggcggagcttgcagtgagccgagatcgcaccactgcactgcagcctgggcgacagagcgagactccatctcaaaataaaaacaaaataaaataaaaaataaactagagtttgtgtgtatatgtttgtgtacaaactctccttgtatatgatttgaaattttctatatgaaaagttttttaaaagagaggaaaaaaatatctagcccagaagagagaaaaaaaatagcccaaaagtttttggttctagtttcggttttgtgtttttgagacagggtctcactctgttgtccaggctggagtgcagtggtacgatcacgtctcactatagccttgacttcgtgcagcccagaagttttatcagtgatttctacagaattttcatgatggatcatctcaatcttatacaaactcttccatagggaagaaaaggaaggagtatttccccaactcattctattaggttagtataaacttgatattgaaaccagaaccaaaaaaagagtacaaaagaggaaattatcaggccaatcacattcatgaacagagatgcataaaaacctaaacaaggcattaggaaatcaaatcaacagcatatttaaaaatgaaacactatgactaggttttgtttgttccaggaaaagcaaaaaggtgatttaacattataaatctataagtgggcttttctgcccatggacgccgccaaagaagcatcgttagagtctcagttctccctgccgtcatgtctaagtcagagtgtcccgaagagcctgaacagctgaggaagctcttcattggaggattgagctttgaaacaactgataagagcctgagaagccattttgagcaatggagaatgctcacggactgtgtggtaatgagagatccaaacaccaagcgctccaggagctttgggcttgtcacatatgccactgtgaaggaggcagatgcgccatgaatgctaggccgcacaaggtggatagaagagttgtggaaccaaagagagctgtctcaagagaagattctcaaagaccaggtgcccagttaactgtgaaaaagatatttgttggtggcattaaagaagacactgaaggccaggtgtggtgactcatgcctataatcccagcactttgggaggccgaggagggcagatcacctgaggtcgggagttcaagaccagcctgaccaacttgagaaaccccgtctctactaaaaatacaaaattagctgggcatggtggtgcatgcctgtaatcccaattactcgggaggctgaggcaggaaaatcacttgatcccaggagccggaggttgtggtgagccaaggttgcgccattgcactccagcctggacgacagactgagactctgtctaaaaaaaaaaaaaaaaaagaagacactgaagaacatcacctaagagattattttgaacagtatggaaaaattgaagtgactgaaatcatgactgaccgaggcagtggcaagaaaaggggctttgcctttctaacctttgatgaccgtgactccgtgggtaagattatcattcagaaataccatactgtgaatggccacaactgtgaaattagggaagccctatcaaagcaagagatacctagtgcttcatccagccaaagagatcaaagcagttctggaaattttggtggtggtcatggaggtggttttggtgggaatgacaactttggtcatggaggaaacttcagtggtcatggtggctttggtggcagccatgttgttggtggatatggtggcagtggggatggctataatggatttggtaatgatggaagcaactttggacgtagtggaagctacaatgattttggcaattacaacaatcagtcttcaaattttggacccatgaagagaggaaactttggaggcagaagctctggcccctatagtggtggaggccaatatttgccaaaccacgaaaccaaggtggctatggcggttccagtagcagcagtagctatggcagtggcagaagattttaattagaaaacaaagcttagcaggagaggagagccagagaagtgacagggaagctacaggttacaacagatttgtgaactcagccacgcacagtggtggcagggcctagctgctaaaaagaagacatgttttagacaaatactcacgtgtatgggcaaaaaactcgaggactgtatttgcaactaattgtataacaggttattttagtctctgttctgtggaaaatgtaaagcattccaacaaagagttttaatgtagatttttttttgcatcgatgctgttgatcgctaaatgtaatagtctgatcgtgatgctgaataaatgtcttttttaaaaaaaagaaatatataagtggaagggggcatgagggagcttctagggtgctaggaaggttttgtttccttatctagctactatttacatgggtgtgttcaatttttgaaaaggcatcaaataatacatttataatctatgcacttttctatatataagtaatgtatcaattttttaagtattttaaagtatatattacttgccatattaagagaataaagggaaaactcatgactatctcaatagatgcagaaaaatcatgtaataatatttcctgagctgggtgtgggggctaatgcctgtaattccagtatttggggaggctgaggcagcaagattgcttgaggccaaaagtttgaaaccagcctgggcaacatagcaagaccctgtctctataaaaaaaaatccaaaaaaaactaataacatttgccatccatttcttaaaaatattacactaggatagaagagaacttccttactctgctaaagcacatctatccccccaacccccaaaaaagaaagcaaaaaaaacagcaaccaaaaaaaaatcattgttaataggaaaataggagcattccactgaaaatcaaggataatccaagagggccaagcacaatggttcatgcctgtaatcccaacactttgggaggctgaggtgagcagatcacttaaggtcagaagttcaagacatgcctggccaacatggcgaaacctcatctctactaaaaatacaaaagttaaggctgggtgtgatggctcacgcctgtaatcccagcactttgggaggccaaggtgggcggatcacttgaggtcaggagttcaagatcggcctggccaacatggtgaaaccccatctctactaaaaacacaaaaatcagccaggcatagtggcacacacctgtaatcccagctactcgggaggctgagacacaagaattgctagaacccagaaggcagaggctgcagtgagccaagaatgtgccactgtgctccagcctgggtgactgagtgagactccatctcaaataaaaaaaaaaataaacaaataaacagaaattagccaggtgtggtggcaggtgcctgtagtcccaggtactcaggaggctggggcatgggaattgcttgaacccagaaggcagaggttgcagcgagctgagatcacaccattgcactccagcctgggcaacagagagattgtctcaaaaaaaaaaaaaaaagaagaatccaaggggcagggcaggcacctgtaatctcagtactttgggaggccaaggcaggagaatcacttgaggacaagagttcaagaccagcctgggcaacataacaagataccagctgtacaaaatatattttttaaaaaagaataatccaaggatgcccagcattgtcaatattgtactgggatggcctagccaacacagatcagctgtcagtatttttttttttttttttgagatggaggctcgctccgttgcccaggctaaagtgcagtggcgcgatctctgctcattgtaagctccacctcccgggttcacgccattctcctgcctcaggctctggagtagctgggactacaggcgtccgccaccacgcccagctaatttttttgtatttttagtagagatggggtttcaccgtgttagccaggatggtctcaatctcctgaccttgtgatccacccgccttggcctcccaaagtgctgggattacaggcgtgagccaccgcgcctggccagtattttttttattattatttttagaaacagggccttgctctgtcacccatgctggaatgcactggcatgatcatagctcactgtagccttgaactcctaggctcatgtgattctctcacctcagcctcccaaatagctggaagtacaggcacacgccaccacactgagttaatttttatttttttacaggtgtaagccaccaccccgggccagctgttgttattaacaggttattattatctgcccagaaaaccccaaaaaaagcctacaaacaaattattagaagttataaaagagtctagaaagaagcctggctttaagatcaatatactatacaaaaatcaattgcgaccaggcatggtggctcacgcctgtaattctagcattctgggaagccgaagtgggtggattacctgagctcaggagtttgagaccagcctggccaacatggtgaaaccccatctctactaaaatacaaaaaattagccagacatggtggctcgtgcctgtagtcccagctactcggaaggctgaggcacaagaatcgtttgaacccggtaagcagaggttgcagtaagccgagatcacaccactgcactccagcctaggtgacagagtgagactctgtctaaaaaaaaaaaatcaatttcgcgtctatacgttagaaacaaacagaaaatataacttttaagagacaccatttataataacaataaatactacagattattttagactaaatataacaaaagatgtaccaaatcctaatacagaaaactttttaactttattgaaaaatattaacgaccttaaaaaattgagaggccaggcgcggtggctcatgcctgtaatcccagcactttgggaggccgaggtgggcggatcacctgaggtcgggagtttgagaccagcctgaccaacatggagaaaccctgtgtctactaaaaatacaaaattgctgggtgtggtggcgcatgcctgtaatcccaactactcgggaggctgaggtaggagaatcacatgaacccgggaggcgcaggttgcagtgagccgagaccgcaccattgcactccagcctgggcaacaagagcgaaactctgtctcaaaaaaaaaaaaaaaaaaaaaccataaggaatgaagacaaataatctaacaaagggttagtatataatatataaaatataaaagaaagcttacatatcaagaagaaaaagttaaccctatagaacaatacagcccccaccaaaatggtcattttacaaaagcagcacagtcaatgcacatatgaaaagaagctcaacctacttagtaaccaggaaaatacaaattcagaccctaatgagatatcatttcatacccaacagagtggcaaaaatttttaagtgtgaacagttgaagggcatgtatttcaacaaaaattctttaccctctcaccagtaatgtataactgctacaaccattttggaaaacaatttagcatttactcccaaagctgaacaaaccctacagccagcaattgtactcctgggtgtatacctatgagaaactcttacacatatgtacaagacatgtacaagaggacatgcataagaatattcatagcggcagtagccagagtatccaaaaactggggaagaaatccacacataattgacagagaatagatcaattgtacagatcctactgtacaatagcacagtaggatgtcatacaacagtgaaaatggaagaacaaagtcccacacgggaacgtgggtgaatgttagaaacataatgacgagttgtttaaaagcaagttccaagcctgggcaacatagcaagaccttgtctctactaaaaatttaaaaaattagtggagtgttgtggcacatgcatgtagtcccagctactcgggaggctgaaacgagaggatcacttgagcctgggaggtcaaggctgcagtgagccatgatcctgtcactaagttccagcctgggtgatacagcaagaccctgtctctaaaaataacaataataatataaaaagcaagttccagaaaactacatatgataccatttttacagagctcaaaaccaggcaaatctaaacaatatttattgtttaaaggtataatacatacatgacaaagtatataaaaatccaatccaagccaaactaaataaaatattgcttcctcatgggaggaggcaaaggagtggatggggaaaagaacacaggtaaaaagcaagttactcctgatgctccatttcttgggctaagtgatgagtccatggggtttgttaaatcacactccacatccaatatttttgttacatataatcctttgtatgtagcaaatatgtcctgtccctggtatcaggattaagccatccatttgtgacacctaggacaccatttcctttgacttgttaattccctttgaaggtcattgatgtcctcaaccaccttggctagtgggatgaagacaatctgtggaagtatgtcttggcccacccaggcctcagctcagccttctaaaactaatagcccagctggtcagatgttaggaagaggtgggcgaagcccactgataaaactcatctactaaaacctccctctatgacctaaagcctcttgtcgtaggctcgctggtctccacctagccctgttccacttgctgtgactattctggcttcccaaccaccccttccagaacctagattggtcatggaggtcacagaggtccatggtaaccgaaacctcgtgtcagtcccacttctgaggccaggtgcaggcacgtgtgcttcagaccccacttgctcaagctactaacaaaggtcagctccgtggccttgaggagttaagcctgtgtcctcgcctgtaaaatgcaaatacagaagtgatgacatctatttaataaggttgtagtaaggatgaacgaggtaatgcacagaaaatgcctaacccacagtaaaggtaccctacgtcactgcctctaaacctcacaagatagtgggagagaattaaactgagctcccacacataaatggcctgacacagcgactctccattccctacttcccacccctaaacacacaaactctgtctcacacacacacacacacactcattcactcaacttaaaaaggcatgaagttgcagggtgagtgtatctgctgcccccttatggccagagaaaagaatcacactgttctcctttcctaggaacccagaaccaaaactccgggtgaaaaacaaccaccccagccctgctctttcctctctcccctatttgccaacttaccaaaaaaaaaaaaaaaaaaaaaaaaaaaaaaaaaaaaaaaacaactactgagcagataaaataatctcaagtctccaaatctctcaatgaaattgcctcagcagggacagaaatctgcaggggaggtaagggagatgctactttgagcaggtttcacctcctagagctagtttcttctttgcaaaatagagacaaaagctgcctcactgaggtcttgtgaggattaaatgatatcctgtatgtaaaacactagcacagatactagcacagtgtctggcacacatagtagatactcagtaagtaatcccagataataatcaccctggtggtcaaacacagtcgctcccatgtaaaatcccagctactggggaagctgaggcaggaggatcacttgaggccaaagattcgagaccagaccgggcaacatagtgagacagacccccatgtcaaaaaaaggaaaaaaaaaaaaaagaattggcctgaggaggctcttctctaactcataagacccttccttttaaagaggaggaaactgaggcccataaaaagggagagatttggccagggtctcggaaatcagaccctgattagtagctgaacccaggctggagctcaagcctccagaggaaggggaaggagaaaaggaatatttcagctcccccagttgctgggcaggacactgtcactttgccaggctcctcttcctgggtccccacctccctggacatgcttggccttcctcacaccttcctcacccctgctctctcatggaccacaggacaatgcagaaagggaactctgctattttatttgttatgtgaaagagtctgggtgcttgtcgggtgcagctagatggtcagtccctgaaggcaaacaggaggcctaagacgacaccccaagcaggatcttgcctggaggatgctgcaccaacaatctgagacttctctaagatgttgaggacctcagtcactttgatgctcccaatatgatgaaaatctgctaaaagctggttatgttcacgagcacaccccatgaggaggaaggtggtattgagaaaccctgtaaggaagagagggagaagtcaggaacactttcaagactcaagagccctgccttcagccaggtgcagtggctcacacctgtaatcccagcactttgggaggccgaggcaggtggatcacttgaggacttaaggccaggagtttgagactagcctggccaacatggcaaaaacccatctcccttaaaaatacaaaaattagccaggtatggtggcacatgcctataatcccagctacttaggaggctagggtatgagaatcacttgaacctgggaggcagaggttgcagtgagccgagatcggaccactgcactccagcctgggcaacagagcaagactcccatttcaaaaaaaaaaaaaaggcccctgccttctccccagaggcccctcacaaaccagaacacctgctctcccatgagagacttaggcaccaggcgccttccccttcctccttggaattcatgtgccctgtcccttgcaaccccaatcccatctctggatcccaccagcctctctgagatgtgaaggtgctggacaatgcctggcagagagtaggcatttgataaacaatattcctctcctctcacctgcctgaaattttaaggtggaactgtaacacgtagaagcagccaaggggcaagaattagtggtgacaaaatttgggaggcaatccttcatgtgctcgcccacacaggtcgggcagctacaggacgcagatgtgatagacttaggagtgctggccttgagtttcacaaaaggctccaaattggtgaggttgttgcagagataagaccggcagacgcgactgtaggaggcaatggacactccgggtggggaaacaaggtaggagatttgcgcagggtaagacgaagacgagctgcagcctttaaagcccacgactccccttgcagtccctgaggagcagaggattgagagagctcagatcagtgtcactggcctcacccagagtcctccctccccccagctctttctgcacccaccctgcctgtcacaatctgtgcctccctccccaacccctgtgtccactcagtgcagctgcacagggctcagatgctggggtctccatctggatctcctcattcttccactgcaggacctcccccagcccccactcctctctcccttgtgccctcctccagggatctgtccacctccattctacccacttacccagcccacaacacaaccagtggggccctgcccctctcctgccagtgtcctgacattatccagatataaatgatggccaggcacagtggcttatgcctgtaatccggacactttgggaggccaaggtgggcagatcgcttgagctcaggagtttgagaccagcctgggcaacatagtaagaactccccatctcaaaaaaaattaaaaaaaatatatatacatatatatatatatgtatagtaactatgtggaattctaatctacagtccctcggtgctgggagtggagctgggggtcagaagagcaagcaaaacgaaattgatcaaacttagactgcttcacctgtctcaatgaacactagcgtctcctcgcagccctcttgcagcttacacaccatgttcctcatcagaagccacttccagttatggaaagcaacagctctgaatcttgaggctgttgcttcatagcacaaaagagctccagcccctaaaaagagaatgctctcccagtcattggcccctcatatcatcttctgagcccgttaactgccaaccaagagttcagcccccacaggtcctgtccccagcgaaacctagatacccagccctcgttccaccagtgacatgaatccagcctcccacctttctgggtcttatagcatccagccccacaggacatacgaggcagagtggagatggcccctagaaggcagaacagctgcacaagtctcaaatgctggggtcccatggccctgtgtctgggtcctgggtgctagaggtcagtctggaatcagtttcagtctggatcccaagctcagttcccatcagtccccgaattctttgtccacctgtctctgggtcactgtttctggagcagaaagttgattgcatcagcttctaggacataggctccctcagaccttctgggtcacaggtcttcccatctccactgtctgccctccagtctaacctgcaccatccaccatcttagcttctcaaagcaggactctcactctcccacttaggtcctcccattggacaaggtgctgagcagagaatcctggcttactgatatgcaggctgttctccagccagaggcaatgagatcagagaaacaaatagatgtttcaaactcgtgtgtgttgtgtgtgtgtgtgtgtgtgtgtgtaagttaacatatcactaaataacccttggttcaacatggaaatttaaaagtatttagaactgaggtcaggagcagtggctcacgcctgtaatcccatcactttgggaggctaaggcaggtggatcaccagaggtcaggagtccaagaccagcctgccaaaatggtaaaaccccatctctactaaaaaatataaattagccaggggtggtggcacgagcctatagtcccagctactcaggaggctgaagcatgagaatcgcttgaacccaggaggcggaggttgcagtgaaccgagatcgcgccactgcactccaggctgggcaacagagacagagactccatttcaaaaaaaaaaaaagtatttagaactgaataataataaacatattacataacacacacattcacacacagacatagacacagacagacacacacatacacacacacacacacacataagtgcatgtaaaatctgctgtaaactgaataaggtctgaagtctaggtaagagtactgtacaccagcccaggcatcacgacaaaatgccatctctacaaaaaatacaaaaattggccaggcatggtggcatgcacctgtggtcccagctacttgggaggctgaggtgggaggaccacttgagccccggggatggaggttgcagtgagctatgactgtacaaacagtattgtacaaatgtcaatttcctgctcatatactatggttatataagatgcccctacagggaaactggaggaaggatccaagggactctatgtaccacttttgcaacttcctgtgagccaacaatcatttcaaaattaaagggtttttaaaatatatacagccgggcacagtatctcccgcctgtaatcccagcactttgggaggccgaggcaggcagatcacgaggtcaggagatcaagaccatcctggctaacacggtgaaaccccatctctaaaaacacaaaaaaattagccaggcatggtcgtggacgcctgtagtcccaactacttgggaggctgaggcaggagaatggtgtgaacccgggaggcggagcttgcagtgagccaagattgcgacgctgcactccagcctggacgacagagcgaaactccgtctcaaaaaaaaaaaaaataaaataaaatatatacatcaaaatttgagacacagctaaagcagtatttagaagtaaatttatacttttaaatacatgtatcaggaaatgtgaagcattaaaaaataaatatattcatgaactagttcaagaaattgtataaggagcaacaaagcaattctctcctacccaaaaaagaatggaaataaggatgatagcagaaatcaatgaaatagtaaacaacaacaaacattattacaaaaaagatccattctatgaaaagatttagttagttcgctggcaaatctgatcaagggagaagatgcaggccggcacagtggctcatgcctctaatcccagtgctttgggaggctgagccaggaggatcccttgaggtcaggagttcaagaccagcctgggcaacacagtggcttatgccggtaattccagtgctttgggaggctgagccaggactgctcgaggtcagcaatttgagaccagcctgggcaacaccttgtctataccaaaaaaaaaaaaaagtttaaaaattagccaagcatgggagtgcctgtagtcccagctactcaggaggctaatgttgaaggattgctttagcctcaaatcacaaggtcaggagttcgcgaccagcctggccaacaaggtgaaacactgtctctactacaaatacaaaaattagcccggtgtggtggtacgtgcctgcagtcccagctactagggaggctgaggagggaggatcacttgaacccggaagccagaggttgcagtgagccgagatcatgccactgcactccagcctgggcaatagaacaagaccctgtctcaaaaaaaaaaaaaaaaaaaaagtgaagaaatgcacaaacccagcaataaccaaggaaatgcaatctgtcaaattgtacatctatcagactggtaaggatcagaaagctgggaaaagacaagtgttggcaggtatgtggggataaaggaacccttggcccctgatgctcatggcattatttggagggctggggaataaaacactatttctggactctgagaaacaaaggagttgagagttctgaccaggatctcaggcccaaagcagcattgcaggggtctgacactacatggtcaaattgggtttataaatacccatttccagtataccctacataggtattacaaaaatgtccaccttcatctacaaaggaacatgcacaataatgcagcattttttttttctgagactgggtctcgctctgttgcccaggctggaggacagctgtgctcactgcagcccccacctgccaggctcatgcaatcctctcacctcggccacccaaatagctgggactacaggtgtgcgccaacacacccagctttgtagagatggagtttttccatgttgccccagctgttatcaaactcctgggctcaagcaatccacccacctcggcctcccaaagtgctgggattacaggcatgagctcccatgcccagagaatgcagcattattgtggtgatggtaggttgagacaatgggagcttccctctctgagaccaagtgaatgcaaaacatgctggggatgtacgctatggaatatcacgcaggagttggaagaagttgattagatgtacacaggatgtgaggcagggtacagtggctcacgcctgtaatcccagcacttcgggaggctgaggtgggcggatcacctgaggtcaggagttcaagaccaagctggtcaacatggcaaaatcctgactctactaaaaatacaaaaattagtcgagtgtggtggtgggagcctgtaatcccagctactcaagaggctgtggcagcagaagaattgcttgaacccaggaggtggagggtgcagtaagccaagatcacaccattgcactccagcctgggcaataagagtgaaactccgtctaaacaaaaaaaaaaaaaaaaaaaaaaaaaaaaaaaagtacacatcatgacagaatgacagaatgtgtacatggatagattgtaaaatcacagtgctgattattacaaatagtatataacataatatcacttgcataaattaaaaactcaaacagaggtcgggtgtggtcgttcatgcctgtgatcccagcactttgggaggccaaggcagacagatcacttcaggccaggagttctggaccagcctggttaatatggcaaaaccccatcgctaaaaaaaaaaaaaaaaaaaaaaaaaaaaaaaaaaaaaaaaaaaaaccccaacaacaacactacacacatcctgggagaacacacacacaaaccaaaagatacatattaaccaccttagaatgagaattgcctataagaaggttagggaatgaaagtggggaattggtggaaaataacagtgtaggagggggtacaaagatcactgaccttggcctcagagacccaggttggaatctttaccccttcatttactagctgtccaatttgttgaactcagagcctactaccttctttataaaatgaagtataatacatctcatagggtcattgtgaagatcaataaaattattaccataagtattaggcaaatgctaagctctttataatcgttggttaccctgttcctctaccactatccctccctcccacacacacttcctctcactctctctccactacctaaaggatcaagttcaacctctttagctggcctttaagcctcccccgaccacaccccaccccaccccagataagcgccacccaacctttccaattttatctaggacagctcccctgcccagcagtccagctagaggtcacgtcggccacccttttctgcctgcaatgcctcagacacacatgctctgtaacccagaaatctgtggccaagaaaggtgccaagacccgcagaaaagctgggacacaggaaagagaaacgaaggctgacaacagatctcacgggggtgagggagattaggccaatcagagaagacagcacacgccagcctcagatgcagaacaactggacctggacctaacaagctgagtacaagtggagacgcaaccagaaaagattgaagtgaaatcctcaagcaaaaaaaaaaaaaaaaaaaaaaaaaaaaaggatggagcagtagtcagaggggatgccacccctacaaaagacaaacaaattgatggaatggaaccttgcagggagagagaggaccagcagagagagggaggcgtaggaaaatgaggagtggggcacaaaggtggggctctcagggagaagaggagtcgattttagagggggagaagaaaaggacacagagctggctgtacagagaaaaggggccaaggcagagaagatggcgggatggtgtgagacggagttcacagaaatacccagagaaggcgacgattacacagaggagcccccagaggggcgaactcttgaggaagatgaacgcggagggtggagccagccagaaattcagaaaaactagaggcgtccccggtagcgaaggaagccgggaaggggccaggctatcagggcatgaagcacgggagaaaatgggtccgaagagggagagcgtccgagagaaaaggaaaatcagagattaggaaaatcacaaccgacacaaagacaagaagagacacaaggaaaggggtgcaatctgaggaaggagggcccggtaagcaacccggtaatcacagcgctgggagagaacgcataaaagaagggtagctcaggagttgtggggcaccggaagagacataacagaaaacgcaggcctccactcagcaaaaacaagccacgcgcgaagtcgaggtacaaggcaagggaaggccagaaacgaggcaacccgtgcacagaccgggcttggtcaacgccccaggggcggggccaggcgggccgttcctggggggcggggccagcctcggtccaataaggggtactcgacgccccattggccacctgcctcgaaagggggaagacagtctgggcgggcaggacgtgcggagggagaggcagcggtggcgcgaggctcaactcgaagcgctattggtgggactgatagtcttgtgcgccaagaagctggcagaagggaaggggcgggacatcagttcaggatctcaaaccgcattggtcgtctgcctcggctgagagaggcgatgcttgaagttcattggtctttgtgagacagggtaagaaaagcagcgcgagcttggcggttcctctggccactttctcacagtgtctttgggcgtcttcttgactgaatctgactccattggaggctgtggtaaccgtgaactagctgcacgaacacggtccctcctgcctttccgtcctcctccctcttagccggactccctaacccaggcatcccctctcctccccctcgcgcccctcccgccctcgcgccccctctccccttccctgcctcgcgggccccttggcgcgttcccggttccccactcgctccctggggcacgggaaggggggagggggacatgcatgaaattaattgttggtagtggccacaggagcaggaagcgctggacacagtgacttcacatgtttacacaaaaacctgaataaggtgtgagcgcaagagagacattagtgccccaaggagaaggtttttggcccagatcagggcctagcacatgacaggggctcagtaaccatttgtggaatgaatgaaggagtgaaggaaaataacttgaaagtggggcaggtggcgggtgcggtggctcatgcctgtaatcccaacactttgggaggccgaagcaggcaggtcgcttgaggcaggtcaggagttcaagaccagcctggccaacatggtgaaaccccatctctactaaaaatacaaaaattagacgggcgtggtggcacaggcctgtaatcccaggtactcgggaggctgaggcaggagaattgcttgaacccaggaggcggaggttgcagtgagccgggattgcactactgcactacagcctgggctacagagtgagactccatctcaaaacaaaaaaaaagaaagaaagaaagtgggacaggggagccaagcatagtggctccagcctgtagtcccagctactggggaggctgcggcaggaggattgcttgagctcaggaggtggaggctgcagtgagccatgatcacgccactgcgctccagcctgggcaacagagcgagaccctgtcaataaaaaaaaaaagaaagtggagcagggaatccatgagaataaggtaattattgggggtgcaagagagggttctgatttaaaggggtacaagaacaaaataagactaaaggaatgcaaggaggcagttgctttgcagggcatagatgagactaagaattgaaattgaactaagaattgaaaggggcataaaactactggtaggcattggatgaatgcatgagagtggggtgagcattgttgaagaggatgccaggaaacactgttgggacggaacagggtgcttgtgaaaaggggatgtaggactcgctgaaggggtatgtgaggacatgagtaggttggaacctaggatgtgtgtgtgggtgggaaagtgtttggattgaaagaaaagaatgtttgaattgaaagaatacagaatgtcgggcgcagcagctcatgcctctgatcctagcactgtgggaggccaaggcaggaggatcgcttgagcccaggagttcgagaccagaccagcctgggaaacataatgagaccttgtctctataaaaataaaaaacaattaaaaaaaaattttttttttgagacagagtcttgctccgtcacccaggctaaagtgcagtggcgcgatcatggctcactgccagctctgcctcccgggttcacgccattctcctgcctcagcctctggagtagctgggactacaggcacccgccaccacgcccagctaattttttgtatttttagtagagacagggtttcactgtgttagccaggatggtctcgatctcctgaccttgtgatccacccgccttggcctcccaaagtgctgggattataggcttgagccaccgcacccggcctaaaaatttttaaattaaaaaaaggggggacgggtgcagtggctcatggctgtaattccagcactttgggaggccgagacaggcagatcacttgaggccaggagttcgagaccagcctggccaacatggtgaaacaccatctctactaaacatacaaaaataaaaaaaaatagccgggcatggtggctcttgcctgtaatcccagctactcaggaggctgaggcaggagaatcgcttgaacccgggaggtggaggttgcagcaagccaagatcgtgccactgcactccagcctgggagacagagtgagactccatctcaaaaaaaaaaaaaaaaaaaaagaaagaacacagaagaggaagaggagaggggtttctgaagaaggaagatacctgagaaatgtcatggggtaaagaggggagaaagctgggaaagaagccagaatcagggcggggtctaaagaggggcaggatggagacctgcaggtgtggtctccagggcaggagggttgttaggggcaggcccacctggctatgcttaccttccactcctgcccctagatccatggaacccagtgacatgcctgctggctaccactgccccttagactctgccccctgggatgagaccagagacccccagagcacagagctgatccccaggagagccatcagccgctctccaacctgcgcccgctgccgcaaccatggtgtcaccgcccatctcaagggccacaagcgcctctgcctcttccaggcttgcgagtgtcacaaatgtgtcctcatcctgtgagtatgaggtctgggaggggaggaggatgagcctcctccaaagggtggctgacctttgacttgcaactccccacttttagggagcgccgcagggtcatggctgcccaggtggccttgcgtaggcagcaggaggcgcagctaaagaagcacctgatgaggagaggggaagcctctcccaaagctcccaaccacttcagaaagggaaccactcagccacaggtcccctgtgagtgtctctgaccagcgatggggcaggagtttgggtacaggaggcaggtatgggaaaaagaggcccagtcctgctgctgaattggtgtacgaccttgaactaagggtttctactccctcggcctcagctgtcccagcgttgagagaatgcagcgagttctgtgggtcaaaaatgggctagaggccgggcacagtggctcacgcctgtaatccgagcactttgggaggctgaggcaggcagaccacgaggtcaagagatcgagaccatcctggccaacatggtgaaaccccgtctctactaaaaatacaaaaattagctgggcttggtggcgcatgcctgtagtcccagctactcgggaagctgaggcaggagaatcacttgaacccaggaggcggaggttgtagtgagccaagatcacgccactgcactccagcctgggcgacacagcaagactccatctcaaaaaaaaaaaatgagctagatgggggagatgagaactgtctggggttggggtaggataggggtcaggagaaagggctcattagagctctccctggtccttcacagctggaaaggagaacatagcaccccagcctcagaccccccatggggcagtcctgctggcaccgacaccccccgggaaggtaaggagaggctggggcctgagaaagtgtcccccaccctagttcctacccagaccctttcttctgtgccctcaacacctgggttctagccccagccctggtttgctatgtaatctagtcaaatcactgctcttctctaggcaaaatgaggggaaaacgagggcctcccagccccaaagttttggggttctgcccgtatcccagaatacactcaatccttttccagccttgtacccaactccagcctgtgccctctgcccctgcagaactcctgtgggcctctgctgctcagccatcccccggaagcctcgcccttgtcctggactccggtgcctcctggcccttgggtccctggacactggctgcctccaggcttctccatgccaccaccagtggtgtgccgcctgctgtaccaagaacctgctgtctctctgcctcccttccctggtaagatgataattcaacattcattcaacatatatttgagtgccaatctgccacatattggagagggaagaggaagaaagcataggtggggagagggaggaaagaaactatgaccttggcccctatacactctgcattcttttattcttattaggctttgaccctggcacctccctccagctgcccactcatgggcccttcaccacctgcccaggatctcacccagtactgacagctcctctttctggagagccccaagggccccctagccagccccgcacgtgagtagggagagaaggatgtgtatcataagcctaagcctgtgctgtgtccaaccacagtgctggtgtccaaccacagtggataatgaagatgaaaaggtctctgactaataggcaaggcagagctctcctagtactgccatttcctagctgtgatgctttggacaattatctttacctctctgagcctgtttttctatcagtaaattggagacactattacttacctctctgattgttgtaagaattagcaataatgtatggaatagacctagcacagactctttaatggtagctgttatatctgcttagacagatttgatggggtaagattgcctgctgatatggggggcagagatgatgagagcctcagagacccaggagaggggccagaggccattaggaaaagcttcccaaaggtgagccaagctctccttcaagttctatggtgactggggaactgggggaatgggacccagactctgataggtcagggacagtaatctcagtcttctaggtgtttttttaaaaaccggcatcaggtggggcctggtggctcacacctgtaatcccaacactttgggaggctgaggtgggaggattacttgaggccaagagtttgagaccacctgagtaactgagcgagacttcgtctctacaaaaaaattaaaacagccaggaatggtggtgcacacctgttttcctggctacttaggaggctgaggtgggaagatggtgtaggcccaggagttcaagcttatggtgagccatgatcacaccgccactgcactccagcctaggtgacagagcaagagcctgtctcaaaaaaaaaaaagacactagtgatttcccataatcctcacagtagccctgggaggaaaaactggcaaggatttttactttactgaaaacaaaataagtcaagacacagcttaatggcccagcaggctctcagattcccagatcaaaacatggcaaaatcctgcccctctttcaatgtgtgcatgtctgttcatctgtttaaccaccctggcatcttctctccttgtttctagacactcaactctgatactccagccctgtggcaccccagaccctcttcagctacagccacaggtcctgggaaagaagtgggatctagggccctgggaggaggttgagcctggggaaggaaaaagcaggaaactgaaggaagcaggggctgaggaacacttagagggtgggcagaagcgggggttcccagtctgcttgtctccctttcccttgcaggcctctggagcctcgtgcctggcccggacatctggcccctcagagtggcagctgcagcaagaggcagctgaagccctcgtggggctgaaagattcatcccaggctcctcgtgtgaccccttctgtgccccccaaccctgcctggatctccctgcttcacccctgtggcccaccaggtgggccatgaaaggagaggatggatagggatggctgggaaatggagatcactgaagtacacagggactaaccaaggagatgagggggtcgacaggttgaacgtcttcaggcccaggaccccaagctcctcagcctggcccctgggattgcagttgagagttattcagtgaatcctttttatcagtttggcactcgacagcaaatttcttgatatcaaggaaagtggggcactgagaaaggcagggacttgcccaagggcatatagtgagacagtggcagggaacccaatgctctgtctctggacccaggctgcctgctgaagtctgaagtggggtctggcctgggaggaggtctgataagtgccttcaaggagcttacgttctagttagggaaattggatgccttcacaaggctcagtgacaaacctgaagaagattggaggaaccttgaagagtgagaaacacctagggggacagacagggaaagctgcgaattctcttgtccaaatagtggattgggcagactggcctggaggaaatgctagaacagagggaaaggaggctggagaggcttctgatggtggagatctggcatgccaggcttaggtgtctagaacagcaactgtatgtgaaggggagccagggaacgtttctgaactaagcaaggacaaattcagagaccctgagctttagaaagacaagtgggtggctttgatggacggtttggaggaggcaagactggaggtgggaaaattagcaaggaggtctgtgaaataatccaggagaacaatgatgaggcctggattggattcggtaaaaagagggggttgctagaaggaaaaacaggtgtgacctgatcctgccccttccttcttgcctgtagctcctgctggaggaagaggattccagcctgttggcccctgtcttcgacccagcccagccccctctgttgctctgcatattggccgtctggggtccatctccctcctgagctagaaacccagagatggaggctgtcttgctatggcagggaggtgacagcctgctggcactgtatatttagtgtcttacttaaggatttatgcatggaatttaatgtagtacaagcttcgggcttttttgtttgtttgtttgtttgtttgtttaagctttcaggtgcttcattagctttcagttcctttggtagtgtgggcatttccttggctgacagtggatattcttgtacccttcttgggtcctgggatctcttgaaatccccaataaagagagagttgtgctatttaagctgaccagtatctataaacgtgtttgcatgagtttacatcccaggattccatgattctgtaaatgcctatgcattcatgtctgtctccatgcatgtgaaaacaggagagtgttttcattttgtgtctaggtttgtgtgagtaagcaagaaataaacctttgttgttgtaagccactgagatttggagagtgttaccacagcctaacctagtctatcctgactgacagaaaggacttgttcatttcgcttctcaaagtgaaaaatctgttatccaatagctaccatagatgaaaacaaacttggatttttttctttgtccaaataaaaaaaaatgatgtaaagaaataatgggggattcactgattaattgcccgctctgtgccaggcatagacagtttccagctgtctagaggggctacaaatcgaaatgcctacagggctgagcagatcaaataaatgagtaaagaaggccagatggaccctggcaaactgagaatggatgccttgcctaaggagcagcctccttttggccctagcagattactgccaggcgggaatgtggactcagtgttgctccatcttctgattttttaagagaaactggaaaactagatttccatgtaaaacatcttaattttcaaatgttggctcagttttcttctttaaattctatacgtgccaaataaaacatattttcaggctagctttggccagtggaataccaatttgatacattttccagatggggaaattgaggctaaccagaatagaaagaatcgagttagtctttatcacaagtttttcctcaactagggaggttcacgtgtctgagtttcgaaggatccataaaaggttaagaaacatttattaccatttattgagtgcccactccatttgattcacatatcttcacagcaaccctggaagttatgcaggatggttcccattttacaagtgaagaaacaagcttaaagaggtaaagtaacttgcccaagtgttttaggggaaatttctaggcagagatcagaggagggttccttctctttgccaggctccaaattagttaataatgtttataaagcattgggccgggtgtgatagctcacacctgtaatcccagcactttgggaggccaaggcaggaggatcgcttgagcccaggagtttgagaccagcctgagtaacacggggagaccctgtctctataaaaacaaataaataaaagcatagaatgaaagatgcaccactcctttccccaatcaggactccagaagatacatacaagtcaagagtttttcaaaaaagtcttttatttttctcctcaagatatcattaagaataagatcttacctgcatttgtttctcagtcctctggtgtcaagtccttctccttgaaccattccgtacataggaaaacctgttgagctattccaaagacatgaagcctggagacccccttcccattcccacccttagaaggggctcaagggatgtgcttgatcactgattctttttcctgatgttacctacaccccttgttttactcaagatgattgatggtgatgacatccaattacaacttgttatttcttatttgggattttgagagggtgggtttcttctcctccctagcagagtacagagtaacaaacctgcagcacttctcaggagatactgagatatcaggagaccaaagtcggcttcacacccttcttccctccccttagctataacttagatatatgattgctccttaatagacctgcctaagacttggtgtgccatgctttcctagtgacagatgaccagggccacaaagtcacagagaaaggaagcactgcaacatgcaacatggctgagattctgctactcagcactgaccaagggtcctctgtacaccaaggtcacagagctgagaagggtaaaagagaaagtataatttggggttaaaggatggcatgaaaaggggaggaaaagaggaagtgatggagattgggggaaggagtagactagaggccacctctccttcacctctcctccagtacccggccttcagtacccagcctgggcaaggcttttcacaccagttggccaggccaactttgtctttcaaatcgttagggccccccattagtgcctgagggaaagggccagagcttctgcagatgtcagtcttagggaaaagagcagatttaagagttgctcatgctcctaagttgttgcctgttcaggtgcagcactcttcacctgtggttgtagggagccagtaggctcctggcctcttcttggctctgagagattacagataatagactgtgagcactgtttcctatactgccccctttcccacttcccagtgccaggtagggaaaggtattgccatggtccaataaagtactgagtaaatcatctcccttctaaaccttctttgtgtaccctcttggcactctgcagacttaaccaatgaggtcccaactatgaagcaccgtccctgttcctctctctcctcacaagactcctccccacagtcacccaggttttatttcaggagcttatttcacattctgccctttgggaatccatgctcctttcgcttcagccctacattaacttgctccactcctgacctcaattctcgtccaacgtagaactgacatcatacacttatcccatccagcctatacgcagaccctcattgcttcgtccacataggcctcattctgcacccctgttccattgtgtagctggctttgcagccctgacacgtttgcataaatacagtcctataacccctaccctgcatgggccttcacaagatcctgaactcttcacaaaaccaaagttcatccttttcatccaactcaaaataatatgttaagcctctcaggcagagttccctatgttcccaaggggccactggtctctacttcatagtcctgatcaccctgagctgtgcctatctatgtccatctatgtctccccctcagagaataagcactctcagagcacaggacttgcctgcagctcctccttgggagctcagaataaatgactgagtaaaatacgttctgtctgattccttaggaattgttttttcctactgagttaacacactccaatgctgcccctctcctcatcaaaatgtgaactttctgacctcaaaccattttttctaagacagcctctgtcacccaagctggagtacagtggcacagtcatggctcacggcagcctcaacctcccaggctcaagtgaccctccagcctcagcctcctgagtagctgggactacaggcatacacctccatgtgagactaatttttattttttgtagagacagtgtctcactatgttgcccaggctggtcttgaatgtctgagctcaaccgatcctcctgtctcagcctcccaaagtgctgggattagagttgttttgtttgtatgtgtgtatttttgtttcttattattttgggattagagttgtgagccaccgtacccagcaaaaaaaccttcaggggccagatacagtggctcacacctctgatctcggaactttgggaggccaaggtgggaggattgcttgagctcaggagttcgggaccagcctgggcaacatggcaaaaccccctttctgcaaaaaatacaaaatttagccaggcatggtggcgtgcacctgtagtcccagctactcaggaggctgaggtgggagaatagcttgagcccaggaggtcaaggctgcagtgagccatgattacaccactgcactccagcctgggtgacagagcaagactgtctcatatatatgtgtgtgtgtatatacatgcaacacacatatatacacacatatacatatacatatgtatgtatatatatatatattatatatgttcatagcaaaatttagtggaaagtacagaattcccatagtccccttgccaacacacagggatggcctcccttttgtatcaacattccacaccagagtggtacctttgctacaatcaaggaacaccgtattatcacccaaagtctgcagtttacatcagtgttcactcttgttgtatgttctgcaagttttggcaaatgtgtaatgacacgtatccaccattacagtttcatagagaatagtttcattgccctaaacaacacccattcatccctccatccctccaagccgacaaccaattatcattttatcattttattgtcatcacaattttgcctttttccagaatgtcatatagttggaatcatacatttggattggcttctttcagttagtaaggcatttaaggttccaccatatctttcttttggcggggtggaggggagggggaggcagacagggtcctgctgcggagtgcagtggtgctggaacgcagtgcacttggctcactgcaacctccgcctcccaggttcaagcgattctcatgcctcatcttcctgagtagctgggattacaggcgtgcaccaccacacctagctaatttttgtatttttttagtagagacgggatttcgtttttttgttttgtttttgttttgagacggagtctcgctctgtctcccaggctagagtgcagtggcgcaatctcggctcactgcaaactccgcctcccgggttcaggccattctcctgcctcagcctcccgagtagctgggactacaggcgcccaccacctcccccagctaatgttttgtatttttagtagagacggggtttcaccatgttagccaggatggtctccatctcctgacctcgtgatccgcccgcctcggcctcccaaagtgctgggattacaggcgtgagccaccgcgcccggcctaattttttgtattttagtagagagggggtttcaccgtgttgcccaggctggtcaagaacttctaaactcaggcaatctgcccatctcagcctcccaaagtgctgggattacaggcatgagccaccgctcccggccagctcatttctttttagggctgaataatatcccactgtttgtaggtactacagcctcaacccatttttaaaactgtgtttaaagagtttattgaggccgggtgcggtggctcacgcctgtaatcccagcactccagtgccactgcactccagagcaggaccctgtctgcctccccctcccctccaccccgccaaaagaaagatacgggggaaccttaaatgccttactaactgaaagaagccaatccaaatgtatgattccaactatatgacattctggaaaaaggcaaaattgtgatgacaataaaatgataaaatgataattggttgtcggcttggagggatggagggataaatgggtgttgtttagggcaatgaagctattctctatgaaactgtaatggtggatacgtgtcattacacatttgccaaaacttgcagaacatacaacaagagtgaacactgatgtaaactgcggactttgggtgataatattgtgttccttgattgtagcaaaggtaccactctggtgtggaatgttgatagaaagggaggccatccctgtgtgtcagcatggggactatgggaattctgtacttatacactaaatttacaggcatgagcctgtaatcccagcactctgggagaccaaggcgggtggatcacaaggtcaggagatcaagaccatcctggctaacacgatgaaaccccgtctctactaaaaatacaaaaaattacccaggcgtggtggcgggaaactgtagtaccagctactcgacaggctgaggtaggagaatggtgtgaacccgggaggtggagcttgcatgagcagagatcacaccactgcactccagcctgggcgacagagcgagactccgtctcaaaaaaaaaaaaagtttattgcaaaagcttgagtatcttcagttgtggcttcaaatccgggctcaggctttaaccttatgtgaccctggacaaatgacttgactctaaggctcagttgactggtctataaccacctcacagagttgtcaattatgaacctgtaaaaactaacatgtacaaaaattaacaccagggacacagtgctgagaaactgtgttctctaaaatcacagactgccagaatttttaaaaatctttaaaatcataacaatagtgaaaatgggacatctcattcttacctggaaagtctaagtcactttgacacagagaagcagtcatgatctcagagaagcggtttttagagacaacattgtacatttatctaaactttctaatgtccaaggaagcagaatcctgggtctgctcctcgcccaggcatgatgttagctccgttgcataaatacatgcctgctttgccttatgtccatcaaaactctgctttatataaattttacctaagcttcactcttcccaaaatcctatattcaccctgtctcttcctttggtcaggcactccagagttcctctggagagctttaaaaaaaaaaattaaattcaatgaaatgacttaaatgaattaagtgtaaatgattcagaactggtattagaaattattaaaagtgggggccaggcacggtggctcacacctgtaatcccagcattttgggaggccaacgcaggtggatcacctgaggtcaggagttcgagaccagcctggccaacgtggtgaaaacccgtctctataaaaatacaaaaattagccaggtgtggtggcaggcacctgtaatcccagctacctgggagcctgaggccggagaatcgcttgaacccgggaggtggaggttgcagtgaaccaagatcacatcattgcactcccgcctgggcgacaaagcgagactccaactcaaaaaaaattaaataataattacttaaattataaaaagtgaatataaattacccaagtacctggagatttccagttagacatgcatatattacccactttgaatacatatggaaatatgtatgtgttggttctggaaaaacaattgagataatgaaaatattttctcaagttttagaaacagtatgagataggtttcaacaacattctacatgaatgtaaaaccttgatttaaatatatgatcttatgctagaagcatggttggttttaatttttctaacagatacgagtcttggcttattaataattaacacattttgcagccacagtatcagtgtggggtaaaattctaatatttgctcttatgttttaaattctcagtctttccaacataagaaaatagctacacacatttcagtgtttcctttttgcaacaagttaacataattttattggaccacgttatttagttgttgggccttgtaaggattaaatgagatcatgcatgtaacactacagtaacagccacatgataaatgtccaaataatatttacctgtgcctggcacagagcaggcactcaaaaaatattttttagagcatgtgacgcgccatgaaccagaggagccactttaaatggacaaacggggatctcattttttttttttttttttaatggtgagacaagccctgagaaggcaaatggactgcctaaagctacacaggtcagcggggcaggtaaatctaaattggcaaagtaagggctgagcgaacagactccgacactagaaggcagagctgaactaacttctgctaaggtcccgcctctgccgctttgtcccgcccttatcttctcccctcctccagcgcctcattcccttttcgctcgccccggccgtgctgaagcaacttccgccctgagaagggtggggcttccgtctcccgctctcgcgactcctggcggtgaaggacggaagatgatagccacatttcttcctcgcccttcccctaggttccctgtcacagttccgcccttactactcccacttccggccagggaacagccacttccacccggaaaaggggttgttccgccgtggggcgccagctgtggcccacccatcctgccccgtactttcgccatcatagtattctccaccactgttccttccagccacgaacgacgcaaacgaagccaagttcccccagctccgaacaggagctctctatcctctctctattacactccgggagaaggaaacgcgggaggaaacccaggcctccacgcgcgaccccttggccctcccctttacctctccacccctcactagacaccctcccctctaggcggggacgaactttcgccctgagagaggcggagcctcagcgtctaccctcgctctcgcgagctttcggaactctcgcgagaccctacgcccgacttgtgcgcccgggaaaccccgtcgttccctttcccctggctggcagcgcggaggccgcacggtaagcgggggctccgagctggaccgggcgcgaggcggcagggccggacgccgaagcctcagagcgcgtgcctgagggccccgaggcgcccggcgcgggcccgtcccgccccctagagccgcggccacgtgcgagcggcaggcccggacatgcccggtcagcgccgtccgggaaccgagcgtgggccccggggggcagcggcggggtgcgtggggcgtccggagtcccggggctggggagtggggtcgcgcaggatcctcacacgcaggggccgggctctgttagtgcgatccagagaggccgtgggcgtcggtgagctccttcagacccgcaggagccggagcccggcgttgaaggggccgtgggaagtaacggggggtaccacggtttaggatgcgctggagcgaaaggattggggtggggtccgtgctcttggcagtcgtctctgccaggcctgtgttcacatgcttgactttctccctcagatgcctggagttactgtaaaagacgtgaaccagcaggagttcgtcagagctctggcagccttcctcaaaaagtgagtttggggactgaggttcaaaacgggtggaggctgtcgccttggcctgcccatctgagccccagtgtttgccggtccctggcaggcgaggcttgtttggggcctccgtggctcctttcagcgtgaggcctggcttgtgttccggttccagcctctctttgtactctgggcacagcatagttgtgttgaggggagggcatttgggatatggggtagtttgtggagatgactgaatcgtgcttttcccactgttttggtcttaggtccgggaagctgaaagtccccgaatgggtggataccgtcaagctggccaagcacaaagagcttgctccctacgatgagaactggttctacacgcgagctggtgaggaacttaggtctttggctggagagtggggagctgggtgacccctggcacaaaccatacttccctgtctcctctgagctctttcccgccccaagagggagagaaacccttggttgtgtcaccacttgctttgtgtgatgtgacattcgataacttggtactccaagtttttatgacattctaagagctttgtgagaggaggacctgtggctttgagcctcaggggaaaccagagacagatgaatgttcatattttgcttacaggtggtttaatcctttctatatacacggaggcagactccctgggtttggatccatcttttacatctggctgtgtgtcctctggcaagttggttaacctgcctgtgcactctctcatccccaaaatgggactaattattgtaccagtactagagtattgcaaggattgaatgaatttaaagcagagtgtttagaacgtgtctgttgcacagtagttattcaggaaaaagccagttgtctttactattgctcagatcatcaagttagccttctccatatctctaacaggctgtttctaactaaatggttggagatctggccaggtcagtccctgctttaaatcttgacttctgatcttatggacaccctgcaacctcgtgccagccccgtctcttttcaatcttccaataataatttatgtacagtccctgactagtgttagttctcacgtgtcttaatatttcagtactcactaaatcttcactttcaggaagatgtaacagggtgggcggtggcagtgccgtgttatgtcaaggtgacagccttagcaccgaccttcactaaggggcctcggcctctccaatcttaaaccttctctctctgtgaagtggggactccatcctgaccacaacttgtctccagataagaagtaggtgggaagcagggtttggaaatcggcaaaactcctccatgacccggaaaagagttggccttggtacaggttgcttggcccttcagaatatgaagcattttgtagatttgtggtacacttgtgcctcaaatgtctattggggcccactctttcaggccatggagtgagcacagaggaccagcataactcagccgcggcctctgaggactgaaagatgaacttgctgaggtgggtcgggttgctggcataccacctacccaccgtttgttttagacagaaaatggggcggatgaagagaagctgacttccctgggcgcacagcagtgacaagccctggaagttacatatctcctccacctgtccccccatcttgctttggcagtgcctcaagggtcagttggtcagagcagctttggatctgggattagcctttctcatttgctggggtgaagacacgttctgcacataccaaatacctccaaagtaggactgtatgtgtcttgtacatttttttttttttttttaacatggggagggattaacaagagatggcattaagaccttggataataaacctagttgcatctgctggtcatggtagagctgctgtggtcccttgcagcccacagtggccctgcctggaaacctcaagcaggatgtgcatcttctgcctgcctactgatctccatcacttggagtaccccaaaggcctctttttcacctcacttgcccagctgtcctagcggcataggatggttgtgtggtagaccagaggcctgttgtgtatatttttgttgggttatagccacccctgtgtatctacatgcacaagggcagagttgtagttgtggcagaagctgtagcctacaaagcctgaaatatttcctacctgaccctttattatttattttcagggacagggtctaggcctgtcacccaggttggagtgcagtggcacaattatagctcactgcagcttcttgggctcaagtgatcctcctgccccaccctcctaagtagctgggactacaggtgcctatcagtcaccatgcctagctaattttttttatttgtagagatggagtctcactatgttgaactcccaagctcaagcggtcctcccgcctcagccttccaaagcactgggattacaggcaaagttgaccagcctctattctagagtttaacatgttccacccagtttggcagtcagcttatactgatcatgggagtgatcttgttttaccaaagaggaagctgtggtgcagacgggcgaagggacttgctgcaagttaccctgggagggcttggcagggtggctctgtccaaaactaggttccctgctatattcccttttttctactcataagagtctggcctattttgcctcctcagatttgaggctaaagtgtgctaaagcagcgcccttgctgagcagggccaaattgtggagacctataggaatgagtgtgaggtagacaggtcttaatcctggggtttgggggtaaagaggcccatggtagaagatggggccctcttgagggtggtctggaaatggagcagagctgtaggagtaagcagtcccaaggcagtggtgtaggaggcagggcaaggtagaggaagaacccgcaaagacttgctctcactggacgttcaagggatggccgccatgggtctttatgaagggggtggtgcagtgtagccccggacaggcttttttttttttttttttttttaaacagagttgcactgtcaccaggctggagtacactggtgccgtctcggctaactgcaacctctgcctgccgggttcaagcaattctcctacctcagcctcccaagtacctgggactacaggtgcccgccaccacgcccagctaatttttctatttttagtagagacgggttttcaccatgttggctgggatgctctcgatctcttgacctcgtgatccgcccgcctcggcctcccaaagtgctgggattacaggcatgagctcccgcacccagctggacaagcctcttgctgtcttaattctttaaaggacctgctgaagatggagatgtgggagtccagtttggtgtcctggtgtgcgtctgagagcagctgctgaattgggatgtctggaaacacttcttgtaggttggaggctgctccatctctggctcctgcatggggctgggcacccacttgtgctatgatagtagaaagaatgagatctgggaggcatcacagaagtgagttaagggatgaatcaaggtcaggagagtggtttcttacaagttcggcagagaagggtcagctagagtgtgctggggaagttcttccctgcctttgactcagtaggtcaggatgggaccaccggtctggactttgctgagctgtgatgactcctaaggagccgtgcttggttggtctgccccgtgctcagatccagagggaccctccctctcggtctagcaggaacacagctgccctcccttgaccatgaactcacagtagagtggagaggggtggcctcctttacagttccaggtagggggtgattcctggacaggggttcctgagaggagtgggttgccatcccaagaatgcacacagcagaggagcagaaggcctctagcatggaggaactggaggagaacccatttgtgacagcaacttgctcgcaattggccctcatgagtaccagctacggcggtctgcatttgtgcagctccacatcaaaagctggggctggaaccttggtctccagggggtgaggaaaaaggtcagtgttttaatagaacgcggtatttcaactcttagcattttccaatttgtgaagttaataacccttcctctcccttctagtgggtcagaaaaaaataattagcatgaactgggatagcaagggaggagcttgtaatatctgaccaaggttctccatgccaaaaggtttttatacagccttaagaaaaatttaagcctccattgaagaacctaataggcctttgggaggccaaggcaggcggatcacctgaggtcaagagtttgagaccatcctgaccaatgtggtgaaaccccgtctctactaaaaataaaaattagccaggcgtggtagcaggcgcctgtagtcccagctactggggaggctgagacagaagaattgcttgaaccccggaggcagaggttgcagtgagtctgagatcacgccactgcactccagcctgggcaacagagtgagactgtctcaaaaaaaaaaaaaaagcacctaataggccttatgggagcttgttctctaccagtcactgtgctcaaggtttaagtaaagtgtctcctttagtaccgcagcacaaaccacctggaggataggtgggtcctgtgtccctcctgaggaggaacggtgtcaggattcaagctcctgtctgactgctctgggcgctagtcccaacccaacaagactgaggttgagtgtcccatttctggtgtacagccgctttgggcatctctgcgcttaggagtgtgtgccttattcttaaaaagcaagataacagaggcccggcgcggtggctcacacctgtaatcccagcactttcggaggccgaggcgggcggatcatgaggtcaagagatcgagaccatcctggctaacatggtgaaaccccatgtctactaaaaatacgaaaaaattagccgggcgtggtggcgggcgcctgtagtcccagttactgtagaggctgaggcaggagaatagcatgaacccgggaggcggagcttgcagtgagctgagatcacgccactgcactccagcctgggcgacagagtgagactccgtctttaaaaaaaaaaaaaaaaaaaaaaggccgggcgcggtggctcatgcctgtaatcccagcactttgggaggccgaggcgggcggatcaggaggtcaggagtttgagaccagcctggccagcatggtgaaaccccatctctactaaaaatacaaaacattagccaggtgtggtggcgtgtgcctgtagtcccagctactcgggaggctgagacaggagaattgcttgaacctgggaggcggagctagcagtgagcccagatggcaccactgcactccaacctaggcaacagagaaagactccgtctcaaaaaaaaaataaagcaggataacaggaaaagctattctgcgttccccagtcctgggtactgtagttcaaatgggagagcaggtctccacccagagccccagggcacaaccagctacagggcccagagggatggcagcagctgctgggtatttgagctggtctgaaagggtggaggtttccagtgatgtcactctctggcaggattgtggggggtggcttacgccaggtgagtctgtctattggtcctggttatgggcacttattaccaggcagtggcgtagggggtagggcctggagtgaggtggggattttaaagtgagcagatgccagaggtagtgagccaacagcagggctgtgctcttggcccccagcagagcatggttgtatagtatcagctgaggattggttccaggatgaaccccaatacccaagtccacagatgctcacccttactataaaatggtgtaatatcggggccaggggccgggtgcggtggctcaaccctgtaatcccagcactttgggaggccaaggcaggtggattacgaggtcaggagattgagaccatcctcgctaacacggtgaaaccccgtctctactaaaaatacaaaaaaattagccaggcgtggtggcgggcccctgtagtcccagctactctggaggctgaggcaggagaatggagtgaacccggaaggcagagcttgcagtgaaccgagattgcgccactgcactccagcctgggcgacagagcgagagactccatctcagaaaaaaaaaatatcggggccagcacagtggcacacacctgtaatcccagcactttgggaggccaagatgggtggttcacttcactccaggagttcagccagagcaacatggcaaaaccgggtctcttcagaaattatctgggcgtggtggcttgcacctgtagtcccaactattcaggaggtcaaagctgcagtgagctgttaccactgcactccagcctgggtgacagaatgatgccctgtctccaaaaaaaaaaaaaagtataatatttgcatatatcctatgtagatgttttacttttgagacagagtctcactctgtcacccagtctggagtgcagtggcatgatcttggctaactgcaacctctgcctcccaggttcaagtgattctcctgccctgcctcagcctcccaggtagctggggttacagcgggtgtgccaccacacctggctaattttcttgtaatttcagtagagatggggtttcaccatgttggccaggctggtctcaaactcctgacctcaggtgattctcccgcctcagcctcccaaagtggtgggattacaggcgtgagccactgcgcccggcctgatcccatatattttaaatcatctgtagattacttatagattaatacaggccagacatggcacatacttatagtcccagctacttaggaggctgaggcaagaggattgcttaagcccaggagttcgaggctgcagtgagctatgatcacaccacagcaccccagcctgggtgacagaatgaggccctttttttgtgttttaagaaaaaagaaaaagcactaatacggtgtaaataattgttacactgttttgaattgtagtttttttcccctaaatatttttgatccacccttggttgagtctgtggatatgaagggctggctgtatctggacctgatctcagggcaggagtgggctgggaacaagcggtgtgtaagaactgtttctgggcagaagcagcccaccccacacagactactgcctggcacttggcagttatggaagaacccccaattcccccacttgatctttagaactagaggaaagaaatcactagagcagactcagaccaacttgctgatctctgggtcccaggaacaaaccagactctgctctgagctccagagctaggcaggaccatgtgatggctgaaatctgggtgcttcctgcatgtgggccccggtgccatcacagtggcaggacagggcagttcctccagagctgtgtgacacggagccagtgagtaccctctggcacctcagtttcactctttaaaggagagtagcacttgacacacctgttgagtcctcagagtaacccggccctcaggtgaagaagggtggagagatcgaaaagcatttggcacagggcctggcagatgtgtgctccagttaatagaagcgtgcaagcgtttctggggaggctggtgtgtcgactggattttacggagctttttttgcaggcaaggaggctggctggggtggaccagggacttgcccaagccagccttccctgtgtctgcagaggggctggtacacattccaagcagggggcacccactgcacagagtgtctgccctgcccttgttatcctgagctctccagactgaggtggcccggagagtggcaataggtcccttcactcctgcttctctggggcccatggagatggtcacagctaggctccacccctacataacctcaggttcaattcaacagcagtgctgctgggatagtaaccactaaagaagttggccctggagatggtgggagtgcccacccagggtgcagggctgtttgtcaaggaagagctagccgggggggtgggtgaggagagggggctgtcagtttctgggtgttagtgtgtgttttcagtttcccttcttataaaacagtgagaattagctgtttacacacaaggaattgtttacctgagaccttgatcaagacccttaaatctccctctcacactacccccagcttccacagcgcggcacctgtacctccggggtggcgctggggttggctccatgaccaagatctatgggggacgtcagagaaacggcgtcatgcccagccacttcagccgaggctccaagagtgtggcccgccgggtcctccaagccctggaggggctgaaaatggtggaaaaggaccaagatgggtaagcagggtagagggggctgcattgatggagtagccttgaggcccggtcatcaattccccaacgaatggtcctgcatagtctgcccagcccctcaggcccctcctatcagaggcaggcaggaggggattctgcagaaaagcaaacagcacggggcctcaccccgacctctctggctgactagcccaggctccaggagggtaatttagcgactatctgctttcattagcctgctcgttaacttttcccaattgatttttcggggcttttgatctaaatgcttgcacaaacaacaccccgtcagctcccaggggggctcccactactgcccccagctcgttagaatgcacctgactagggccctcagtgggacttggctggcggcaggtggctttttgagaagcctggctcacagccaggagggaaggggctgagaacaggacctgtgctcactggggcctgcatgacccttccctccccacagcggccgcaaactgacacctcagggacaaagagatctggacagaatcgccggacaggtaaggcctgcgtttggggtggggctgggtcccttagtcgctgcccaagcatttccaaagcccatactttgtcaggtagacttatttccttctctggagggcacagcccagggtgctggtggggtcagaggagggctgcccagagacaggagaaaggacagtcctgtctgacttttcctgttggtgctgcttagaaatttggaggcaggctggctgtggtgtctcacccctgtaatcccagcactttgggatgccgaggcaggcgaattatctgaggtcaggagttcaagaccattctgaccaacatggagaaaccctgtctctactaaaaatacaaaattagccgggtgtggtggcacattcctgtaatctcagctactggggaggctgaggcacaaaaatcacttgaacccgggaggtggaggctgcggtgagccaagatcatgccattgcaccccagcctgggcaacaagagtgaaactccatctcaaaaaaaaaaaaattggagggaactccagcccaggtgccactgggcatctatccacagagcacatagctgtacccgtagatgactccccctccccaggtcagcctgcgatgtttccccttagtcctcatgcgtactgagcatcacatgggctgcttgggagaggtggagataagggaggggggctggttcagaacccaggtctccattcagatcctggctggccaacaccctggggcagagtggccacacccctggtgccacagtctcctgtcttggcctccctgtggccaaaatctacccttggccacctcaagcatggtagtgaggagtcagtgagctatagtacagcaggagcacccagggcctggcatgagctcaattctgtatcactgactcaggcctcctaggagccttggagcatttagtcagtcaagtgtcacaaaagaatggaaagtgtcagccctctaggagttgggggtggtctggaaggagaaagctcttccaggcagagtggggcttggcgcacacatcattgctggtggttggatgttggccttctcacatggcagtgggcggaatttggactccactccgccactcccttcctttttttttttttttttttttttttttttttgagacagagtcttgctctgtcgcccaggctggagtgcagtggtgcaatgtcagctcactgcaacctctgccacctgggttcaagcaattctcctatctcagcttcccgagtagctgggactacaggcacacaccaccacacctggctagtttttatatttttagtagagacagggtttcaccatattggtcaggctggtctcgaactcttgacctcaggtgatccacctgcctcggccttccagagtgctgggattaaaggtgtgagccactgtgcctggccactcccttgagactcagtttccacgtctgtgaaatgggggaatacccacagtgagaattagatgagatagatgcatttgaaaccacaaatcggggtgcccacctgtggtgggtagttaggtagctgttacaaagtgccccagcagagacccccttgactaacttttattcttccatcttttcccacaggtggcagctgccaacaagaagcattagaacaaaccatgctgggttaataaattgcctcattcgtaatcctggtctgggtctcttttttgagtctcttgctctgtcgcccaggctggagtgcagtggcgccatctcagctcactgcaatctccgccttctgggttcaaatgattctcctgcctcagcctcccaaagtgctgggattacaagtgtgagccactgtgcctggtctggtttgggtctcttgattgttcttcaggggcatgaggaagaggcgcttcctcccttcccttgggtgagggggcccagggtgattgggtggctgtttacccggcagccagtcgggccttcccaggtcaaacagttcccatctgggtttggaggaaggacccaggggcccttgtggctcactcccccacatcctgtctttgcaattgtcagaaagtgagaaacgaaaggatggctgtgagctgtgacctcagctgggcctgggctgcagaggtggcttccgctggagtaaagcaagagggcccagggttcatgctcttccctggaaggtagaaaaggacagaccaccagggagcctccaccgcaaactgacctgtgctgcctacacactaactttcctgggcctggggcctgcacaggctgaatggtccttgagccttcactctgcatctgagcggtcttgggcccgctgagtggcagtggcaggaagtcggtggaagcagatccctgtgcagaagttgaattaccagggcggccacacacgggctgcacaacctttgcagtcgtgcacggcaagtgggatgtggcctccgcccatgattgggcacctggtcaggctgggagatccaaatagcacccagtgggcagctgtccgacccctggaggggcaagccaggaaagaaacttagggcccgctgtgaccagatgtccctcccagttgggaagactaaactggtttggccaatatctcccaggattcccctgtccaaattattcctgggatctgacccatttcctggaaaggggcgagcctgggttttgaagttcaaactagagtttaaatcacaactctgcccctaatcccacgtaaccctgtgcaccttatcctctgagccttcgtctcctcgtgtgtaagcctgctaactcctgagagactggacaagatgccgtggagagccttggctctgagtagctctgctgctggacagttcagttggcagtccccaaacgtaaggcgtaagagtttaagaagtatcggccaggcacagtggctcacacctgtaatctcaacactttgggaggccgagacgggctgatcacctgaggttgggagcttgagaacagcctgaccaacatggagaaaccctgtctctaaaaataccaaaattagttgggcatggtggcgcgcacctgtaatcccagctactcaggaggctgaggcagaagaatcgctcgaaccccggaggcggaggttgcagtgggttgagatcgagcaattgcaatccagcctgggcaacagagcgagactccatttcaaaaaaagaatcaataaaaatgttaaaagcaccgttgtttacactcagcaactctgtgaagtaagtgccgaaaagtgctttggaggtaggtaaagtaagccataggctgggtaacttgccagatatcccacagctggagccatcatatgaacccaagcaacccagctgcagcctggacctagccactccaagggctctgtgcctcagaaaagaggcccaaagggttgcactctagctgcaggccagtcactccccattctgggctctagtttcctcttttggccattaatgaaaacatttcccagagctgacatgagaactcaatgccaagcgtccggtttgcacagcagcaggcattgcgcttcccaggtaggaagcaaggtctaggtgtcccgagcaggcctgcaatcccgcagccgcgccgctccagccactggggagcagtagagggcctagaaagaagctcagccaccgaaggctcttgaaggtgaattcctagggcttccaggtctggagccaggcttattcctgggagggggttgtaacggggaattgaagtgcagaggggctagtgaccccagcagaacacctggggtcctggttcccagggctacagaactgtcctagatactgtgccaaatgcactgcagaatattcttgcagtcttatcaagtggggggtttgtacccatgttataggagaaaaaactgagtttcagatgaccagtcagttggcagagctgagttgtaaaagaatcctggactcttgaggcccaggctcttctgcgtggatgggaattgcccttttcccatctcctgggttcacgccattctgcctcagcctccccagcagctgggactacaggcacacgccgccatgcccggctaatttttgtatttttagtagagacggggtttcactgtgttagccaggatggttttgatctcctgaccttctgatccgcccgcctcagcctcccaaagtgttgggattacaggcgtgagccaccgcgcccagctggcaattgcacttttttaaaattctgcactctaggaggcagaggtgggcagatcacttgaggtcaagagtttgagaccttggcctggagtggtggctcacacctgtaatcccaacacttggagaggccgaggcaggtggatcacctgaggtcagaagttcgagaccagcctggccaacatgatggaaccctgtctctactaaaaaatacaaaaattagctggacgtggaggcaggagaatcgcttgaatgcaggaagtggaggtcacagtgagccaagattgcaccattgtactccagtctgggcgacaagagtgaaacaccgtctcaaaaaaaaaaaaaaaaaagagtttgagaccagcctggccaacatggtgaaaccctgtgtctatgaaaaaaaaaattggctgggcatggtggtgcacacctgtaattccagctacttgggaggctgagacaggagaacagcttgaacccaggaggcggaggctgcagtgagccaagattgtgccgccactgcacttcagcctgggcaacagagcaagactccatctcaaaaaaaaaaatctgaaatacttcaggcatgcaagtatttagcattcagtattcataatgtaagaaaaacctatgaagcacaacccagtttaagtaacacaggcagggcagggtgcagtgcctataatcccagcacttcgggaggccaagctgggagaatcacttgaggtcaggacttccaggccagcctgggcaacacagtgagaccctgtctttacaaaaaatttaaaaaataggcccagtgcggtggatcatgcctgtaatcccagcactttgggaggccgaggcgagtggatcatcaggtcaggagattgagaccatcctggctaacacggtgaaaccccatctctactaaaaaaatacaaaaaattagccggtcatggtggcatctgcttgtagtcccagctactcaggaggctgaggcaggagaatcacttgaacccgggaggcggaggttgcagtgagccaagatcacaccatcgcactccagcctgggctacacagcgagactctgtctcaaaagaaaaaaaaaattaaaaatagccaggcatggtgtgtgcacctgtaatcccagctacttgggaagctgaggcaagagaatcacttgagcccaggagtttgacgttatgattatgccactggacaccagccttggtgacagagagaggccctatctctaaaaaagaaaaaaaaaaaagtggccagccacggtggctcccgcctgtaatcccagcactttgggaggctgaggtgggtggattacctgaggtcaggagtgtgagaccagcctgcccaacatggtgaaacctggtctctactaaaaatacaaaaatatagccaggcatggtggtggccgcctgtaatcccagctactgaggaggctgaggcaggagaatcacttgaacctgggaggcagaggttgcagtgagccaagatcacgccactgcacttcagcctgggtgacaaagcgagactccgtctcaaaaaaaaaaaaaaaaaaagtaacacaggaaataaaaccaagacaagatgagctctctgtgtctctgtgtgtccctccccagacccaaccctggcgtcccccagaggtaacccctcccaggaactgggcgtttgccactcccctgcacgggtctacacctctgctacaaacgtgtgtccctaagcagcggacgccttttgaaaacaagtcaactgtatcatgctacgatattttttctgatgtttgtgctgtttctgagacagccttatgacaccttcccctattctgtagcattctgttggctcactttgccacagtgtatgcacccattctcccacaaatggacttttcatttgcttctcaatgtttgctaccaaaaatctccctgcaataaatttattttatatatccccttgtatgtgtgtgagggtcccctaactgctcacaaatatctcagcaactccgccctccccactcagacctcatttccctcctaccagacatgctcaaaggaaactgggagcaacacaaagatgactttgaatctctgtccaccacccctagactgtatgacacccgcaagtgacaacctcccctctctggcctcggtttccccctctgtaaaatgggggatggcctaccttgccagtcatggcaggtcaatataaaacaacttctggctgtgcacagtggcacatgcctgtaatcccagcactttgggaagctgaggcaggaggattgcttgaggccaggagttcaagaccagcctgggcaatatagcaagatcccatccctcttaaaaaaaaaaaagaagaaaaatatatgttgttgttgttattattgttattattagagacagagtttcgcttttgtcacccaggctggagtgcaatggtgtgatctcagctcactgcaacctccacctcctgggttcaactgattctcctgcctcagcctcctgagtagctggaataataggcatgtgccacaacatctggctaattttgtatttttagtagagatggggtttcgccatgttggccaggctggtctcaaactcgacctcaggtgattctcctgtctcagcctcccaaagggctgggattacaggcataagccaccatagctggcctgtttttttaaaaaaagaattccagtaaagagctgatcatggttctcactccttgaataccaggaacaccatctcgtatcacataatgagacagggagacattctggtcctcatctcacagatgaaaaatgtcaagcttcgaaggatcaaagtgcccacctagtcacacgggtagtcagccacaggtcagcctgccttatttattcttcatgagtatttatagtgactaacatttactgggcgcctactgtgggccatttctgtgcatgtgacaacccctttaagtccttgtttctaatcccaagaagcaaggaaatggggtcagggaagggacaaggtttgcccaagtccaggcagggggagaggtcaagctcagaaccatcacctgcccatgacacatgcccaggactcaggttccctaggcttccttccaaaggctcagcagtgacgagccagcccttgaaccagcctcttcccccacccaagcagccacctctcaggggaattgtggccaccacaggtgcagggagcagtttctctccactcacagcctgaagcatacccggcaggggctgtccccaggcccaacaagcaaagggcccagtagcgagggccactggagcccatctccggggggctgggcaggaagtagggtggggtttggggtagggatctggtaccctgggactgctgcaactcaaactaaccaacccactgggagaagatgcctgggggtccaggagtcctccaagctctgcctgccaccatcttcctcctcttcctgctgtctgctgtctacctgggtatgtggccaaagggcaggaactggcgggaggtgggggaagctgtggaggctgcagagagggcacaggcagagggaagggggctcagggaaaggggaagaggaggcagaggataggggacccagggaagatgcctatagaaatcgtatctgtgccaagatgggccaaggtggggctggagggagcccagcgaaggagaaggggcgtccacagtctcacacagggaggcaggagcaagagtcacctcccccacctcctgttccccacaggccaaaataaggaactaaagttgctcttgactgagcaccagggctgggggcaggaaggggacttaggggtagcagcattcagcgtctgtcaaggggagaaaaagctttctctgccttaaacctcaggtgcctctctctgttgggagtcccttctcagcactgggggaatgggtgtctcatggactccccctcacctgctcaaggacagctggcaggggctgtggccacgctaacccaggagttcagagaaaaaggttccccacccaaggggacactgggagcaaggattggagttcacgtctgagtcttaagcccgtgacgatgagggtgctcggcccctctccccatctcttcctccttctctcttcctcacctccctcctccacctacctccagaagaggggactggccatgtgggaggcctggctgagagctggggcttcccagaggagcccggattggacactgcagccagcctgagccgcctcgtctcactcagagacacccccagtctccaccccgctctgagccccttcaatcaccagcagcccagcccaaggactgaactcacccctgacccctaggttgacacatacaacttacagagaatgagggccaggcacagggtcacaggccagggcaggccacagactggctcctcagcccaggcagggagaggccagggagccaagagtttgaacccagtgccactcctgactgcctggtgatgctggcaacccgcctgccctcccagagcctcagccatccctcctgtaaaatggggctaaggagagaacctacttctagggttctgtgaatgattacacaagaaaaagcgccaggtgctgggcctggctgaggctggggtgcaaaaatggaccgggaaggctgcgggaggaggggacgcctgcactgcttctggaaggagctgtctggacagcggtcctccagtgcctggaacaaacatccaaaatccagagagttcacagggccagagtacaaagtgggtatgcgggaggggggcaagagatggcgctgcagaggtgagaagggcctcccaggggtcttaccatcccagggagtctcattctcctctcccaggatatcctcacccaccccaaccaggtatgtcctctctccttcccaggggcttcttcactttcccgcatcccccctctccccaggatgtatcagcccctgtcaggggctctctctctccctccccacccaggagagtcctcaccctcttcccaggagtgctggaactgcaggggccagggctggggaaatgtgtcaccatccccagtccctgacccacccaccctgtctctccacaggccctgggtgccaggccctgtggatgcacaaggtcccagcatcattgatggtgagcctgggggaagacgcccacttccaatgcccgcacaatagcagcaacaacgccaacgtcacctggtggcgcgtcctccatggcaactacacgtggccccctgagttcttgggcccgggcgaggaccccaatggtacgctgatcatccagaatgtgaacaagagccatgggggcatatacgtgtgccgggtccaggagggcaacgagtcataccagcagtcctgcggcacctacctccgcgtgcgccgtgagtggcccagccctggcccctactcccactgtcccgctggggacactcggtttatctttgaagtggggatagagccagtaccttcaatgtgggtttcaaaccggcttggacagagggacggacattctcctctgcagagtggggtctctggggggtctggggccttgcaggaggtgggcggggccaggaggctagggagggcaagaggggccagggctctgagccatactacctccttgcagagccgccccccaggcccttcctggacatgggggagggcaccaagaaccgaatcatcacagccgaggggatcatcctcctgttctgcgcggtggtgcctgggacgctgctgctgttcagggtgagccccctcggacctctgagtcagccgggcgagggcctgggccgagggacccccaatacccaggtagccctctagagcctgaggttccccatccaaaacttgggagaatgaaagcacccaccatataggggctgtgggagttaaatgaatgaatataaagaagggacttgaactggcgctgagcccagggggtgtcttcaatttagtttccccttctgggctgtcctcacgtccacctccccccaagaagagtctcattcttctccctaagagtgtcctcactcccctcctgccctcacccaggagtgtggttaccctccaggtgtagccaagaccagggaaggtggggcctggtcctcccagaatctctgatctgtaccagcctctccttaggcactacagaaagtgtgactgttattgttattattcatggagaatagtaagggagtggagactcaagaagacgctagcttgggaggccgaggcaagaggatcacttgaggccacaagtttgagaccagcctgggcaacacagcaagaccctatctctacacacacaaagtcttaaaaaaaaattagccaggcatggtggcacacacctatagtcccagctactcaggaggctgaggtgggaggattgcttgagcccaggagttcaaggctgcagtgaaatatgatgttgccacagcacttcagcctgggcaactgagggagaagaaagagagagagagagaaagagagagagagagagagagagagagagagggcgagagggagggagggaaggaagggaagggaaggaaggaaggaaggaaggaaggaaggaaggaaggaaggaaggaaggaaggagaacactggttgtagactcagagagaactgttacataaccagtatgtggccttggggacatctcttaccctttctggaaaagtacttcctggcatccaggagggtctgaaagatattcacctccccctgctcactgaggcacccaccccacccacccctacagaaacgatggcagaacgagaagctcgggttggatgccggggatgaatatgaagatgaaaacctttatgaagtgagtgaagggtggggatggggtaggggcagttgtgttaggggtgggggtgttccctctgggggtggctgggggcagggaccccaggtgtcagggtgctgatgttcgctgcctcatttccatcccagggcctgaacctggacgactgctccatgtatgaggacatctcccggggcctccagggcacctaccaggatgtgggcagcctcaacataggagatgtccagctggagaagccgtgacacccctactcctgccaggctgcccccgcctgctgtgcacccagctccagtgtctcagctcacttccctgggacattctcctttcagcccttctgggggcttccttagtcatattcccccagtggggggtgggagggtaacctcactcttctccaggccaggcctccttggactcccctgggggtgtcccactcttcttccctctaaactgccccacctcctaacctaatccccccgccccgctgcctttcccaggctcccctcaccccagcgggtaatgagcccttaatcgctgcctctaggggagctgattgtagcagcctcgttagtgtcaccccctcctccctgatctgtcagggccacttagtgataataaattcttcccaactgcagaccttggcaggagtcgtggatcttacgggaaccgcctctcccacatgtccctcagacccaggagtcccagcccaagccactccctgcccactccccacacctgggaccaggtagccagtctgggctgccctcctgggagaacaagatgtctcttgggaaggtccccagaccaactgaaggactggtttggccctctttgcagggcctcaccctagggtcatatccttaagcaagaaggggacaagatcaagatggctgtggctaccaaattacttacacttttttttttttttttttttttgagacagagtctcactctgttgcccaggttggagtgctcactgcaacctctgcctcctgggttcaagcgattctcctgcctcagcctcccaagtagctgggattacaggcgcctgccaccatgcccagctaatttttgtatttttagtagaggcggggtttcaccatgttggccagactggtcttgaacctctgacctcaggtgatccacctaccttggcctcccaaagtgctgggattacaggcgcctgccaccacgcccggccgctttttttttttttttttttttttttgaggcagagtctgactctgtcgcccaggctggagtgcagtggcgcaatctcagcccacttcaacctccacctcaagcgattcttgtacctcaggctcccgagtagctgggatgacaggcatgtgctaccacacccagctaatttttgttttagtagagacagggtttcgccatgttggccgggctggtctcgaactcctgacctcaagtgatccaccatgcttcggcctcccaaagtgctgggattacaggcatgagccactttatgcgtatttaagccttggaaacacagggactatcttgtggattggggctagtacagaattcagactgcagccttttcccgatgcgttgacttacagaaggggcattttggagggtctgtggtcctaacctggggatagcagggagatcccggggcaatgacagagaggcacagagacacggatttcctgagaaagggagaggagagaggctgagacccagggatcatgaaggggacgagcaagggaaggaagagatgatgagaccctgggaatccgggagagagacagggacgtggagagaaagggacagagagagagcgagaaggaaaggaagagacagaagggagaaggggcaaccgaaaatgggcacgaagaggcccaggcacagcaacagctggggaaatgacagagactgagacggagatgcagaaagatacagagagagctggagagggtagagaagggctttcggggagaaagtgatggagggacagagaggagaggtggaggccaaggagggaaagaccccagtagagaaagacagagggacagagaaggggatgcagacgcaggcgggagcacacccacagaggcgaaggaagggcgcaagaccatgagaaccacagacgcggaaagccggggaggtcgtggctcggtctagggcgcacggggagcagggcttgccccccagcacctccggggaggtgaccccagccgggagatgcgagtcccgcggagcccgcgcccggcggacggaccgatggacaaagccggggagagctcgggcgcggccggggcgggggccggtgcccgcagggacccgggcgcagcggggaaaggaggggcgggcaagcggcgagaaggggaaggaagcggaggtgccgggcgggcgcggggcgcgggcaggaagcggggaggggcggcggggcgggggcctccggaaaaacgccccgacttcctgccccgccagagccaggaagcgggagccgggacccagggcccgggatcgccgagcccgacctcgggcgccccgccggtcacctccgcgcggacaccaggtactcggtccccggccccgcccggcctcctcccctcggctgttgggggaagtggggaggaggagggaggggctggggcgctgccggcagcggaggggcccccttcggaccccacggaaccagcggccgcccctccttgggcctcagttttcccatctgtcaaagggagcaaagaggggagaactcacacttgacgagtgccccataggtggggacgaacggtgcgaggccggggccaaggcctcccacctgctcagtggagaacggacgatcactaccattgtacgggtggggaaaccgaggcccggggagccaaaccgactcgtcccagggaacgcacatcgtgagaaagtgtggagttgggatttgaactcgcacgtgctttccgcaaagcgccatcctccaacccccgcatgctttagggccacctaaaaatgaaaaacaacaataacaacaacgacgagggtcgctgtgaagctgaaagttgcagagtgcatttgaaagagttttcggaaagctcttttctaggtcattaattataccgtgagagacaggtgtagggagagagctggaggccttctcccattgtacggatgggaagactgaggtctacagagaagtcattactttttgcagattacactgcatgtcagagggaaagttgtgctggaactcaagactattgcttttccggttccaaaggaaggggctgggggtgggagacggaggggattgatgtacgaggattggaaattcagcgggtcccctaagtggggagactaataggacggggagccccagtccgccgtccgagtgctcagcgctggggtgactaggagatctccgatcgaactcgggaggagttggacccatctgcacctccgggcgcggggcggggcccggggagtgacgggggcagtcgagatacggaaacgctggccctccaagacaggccagagcggccctatctggcctgcgtggcgcagtacagcgctagagcggccggcgggaggagtagagtcgtcggggccggagcccggcaggagccgggctagagcggctggcaggaggagtggagctgggcgcaaaggtggactcagggcggctagagcgacgcggcggcaggggtggggagagtgcggagcccgagcgcggaggcttcggttccggtggcggcgatggcttctctttccacctggagcaggtgagggacgcggtccccagcgggtgtcagaccctgactctgcacgtcctccccggcatccctggccgtgcacactgccacgtcccccgtaggatttagggcccgcgtaagacccgccacgtccatgtaagatttgggtctcgtgtagacccgcctcattccgtataaagtcttacagaccctccaggttcctgccagccccccatggagaactggcttcttatagacgtggggtcctcatagaccagtggcatcccctagaatccggggctctatagaccatgggtctcgggacccaccacgcacccctatggaattctgagtcccttttaagtctccagaggttccacagactggcagctgtccctatagaatcatgatcctgtatgatccctggatcctttagacccactgtgtgtcaaatagaatctggggagttacacattccaacgactcttttaggttctttaaggctccagaagttcttggagaccctgagtcacctgctcaacacattatagaccctgagacctccatagaactcaacacccatgtggccccccaacccatggaccttctaaaccagccctaaccccccagcgccccatgcacgcagtgttccctctgctggaccccccaggccttgtcagttgcctatagatccatctattctctgacagcttcacctataattctccagcctttgtgggactcccccaaacccctcctcctaaacaggcgacactcctcgcctccatcatctccaacccccaagcctctgtggagcagccgtatccaacttgcactcctgcctaggccatagtgaccacatacccgtgacttttccaggcatccataagaagacatgatgtgtctcagagctttggttcagattttagtttctgaagggtagggtgggggctccccatgctctgaagcaatgctctctgttttattttgttttatttatttatttatttatttttgagacgaagtctcacttctgttaccaggctggagtgcagtggcgcgatctcagctcactgcaacctccgcctcccggattcaagcgattctcctgcctcagcctcccgagtagctgggactacaggctcgtgccaccacgcccagctaattttggtatttttagtagagacagggtttcactatgttggccaggatggtgtcgatctcttgacttcgtgatccgcccgccttggtctcccaaagtgctgggattacaggcgagagccaccgtgcctagcctattttattttaagacaaggtctcactctgtcgcccaggctggagggcagtggcacaattttggctcactgcaacctctgcctcctgggctcaggcgatcctctcatcttagcctcccaagtagctatgactacaggcatgaaccaccacacctggctatcttttgtagagatgggggtttcaccatgttagccaggctggtctcgaactcctgagctcaagtgatccacctgccttggtctcccaaagtgctgggattacaggtgtgagccactgtgtccaccaaatgcagtttattttaaatgcgtaaactctgtagcccaactgcccaggtctgagtcctggttctgcctcttatgagctgtgcctcagtttccttctttgttaaatggaggtgagaataataatgatctcttggagtcaccgagaggattaaatgagttattacctgtcaaccagcgatgccatgcctggcacatactaagtgtctcttttgtgtcagctgtcatttcattattattgtgataaggaataaggagataagaacttggcaagtgcacagttccagacctggcaccaagcacttgcaaagataatgagtatcccctcctttgcctttttaaaatttccctgcctcagttgagcgtttctacctctgagtgggatgagcatgcaccctccacgtccgtggtcatgtttcatagtgagacagggtctcactgtgttccccaggctggtctcaaactcctgagctcaagcgatcttcccaccttggcctcccaaagtgctggggttacaggcatgaaccacctcacctggccagtttgcaaatttattaaagtgaatgtttaacagtacttgaatcttgaattgcccaagcttagatattggacaatacactttgtgggaaataataaaaatgatgccttccccaggtggacccacagggtggcatttggacactccagaaagcatcattgtttaatcatcaaaatcctggttaccatttactggggagctagggaggaggcccataaagcaggagaagggcgggtctctgctggcttgggttataaatagctttgggctgtggggagccccgccgctggtccaccccacccctctttccacagctccttcccacctgacacgggctccgtggcattagtcagactaattaaggacacagaagatgtcggtggaaagactcagagagaagtggagactcaaggagagacaaagatgggagagacagcaagagatgggggagaaaaagggatggagagatgagagacagcacatgagactgtgactcagagaggtgtgaggatggtggctgcagaaaccagatgtgggaggacagaggcacagagacagggacaggacagacggagctacagaagcaggaagggggtgtcaccgctgagagggagagatggagggaggagaggcagggatggtggggaaaatgagacagttctggaggaagggaaagagaaaaatcaggaaacagggtgaaaagagaccaagacatgagacagattcaagggacagacagccaaggagagctggctgcggacagaccaaggcgcacgtagggtggaggggacagacgcaccttggagatgggctgtctgaggccccatcacttggtttctgggactggaagcctgggaagagatgaggtccctgggggaaagaagaacttctgggtttggggactcccagtccctgagggaggagggttctgagttttgttttcttatgtggagagttgggggttgggggtttgccattgtgacttcctgtcacaggaagtggggctggtgggttccaaggcaacatcctgtcccaggcctgtcacagaccagaggagacccctgcaccccacttctctcccgcctctcctctaaccctcccatcccctcttgcctctgggctgtgccctcaggaattagcccccaggcccctggtccctccaacctgggagtccaggcccccagccccctcttccattagggcattagggaccccagattgcaggctgtcagactcagccttcccatggacccaggctcctgagcctccaacgcctgcccccgcaaggctcccgtccctgggctcccgccccctggcgggtctctgaagggctctttgtggccacacagaggccccattgagctgcggaggctgggatgggggaggctgtttactcaccttcacacctgggccaggaatctgtgagtaaccaccctgggccgcctcctcccaccctcctaaccacagcccctcctcttcctccagccctgcagagcccagggagatggaagacttcgcccgaggggcggtgagtggacagagcaaggggtgaggcgactctggggctgtgggtggagagtcctgtggactgaagctgccctccctttccacaggcctccccaggcccctcccggcctggcctggttcccgtcagcatcatcggggctgaggatgaggattttgagaacgagctggagacagtgagtgggagatagggtggaaaagctctgtcccaggctcagtgtcccgccccaggtcccctcccacctgcagatgctgtcttcttggccttttcccacggtctgtctcatcctctcatctccctggtacctccttcctcacctcgccgaccccacacagcagcatagacgcccacccttcttactcttaaccccatttcttatcgttgctctctcctcccccagcatggaccccaatttcttctctcctaatttctgtcctcatcatccaccattataatattaagtctcatccattctccctgaacacctgcccttgctgtcaccatcattttttggacactgtcaccactccccacttcccaggagctaaccctggcttggatcccttgtgaagtgccaggaatgggtagggtcaaccctaaggcccctcctcttctccccattgtactcaccccttcctgcacccccagaactcagaagagcaaaacagccagttccagagcctggagcaggtgaagcggcgcccagcccacctcatggccctcctgcagcacgtggccctgcagtttgagccaggacccctggtgagggcagggctgggtgggcacagggaggggtggggctgggacaggcacagcttttagcgaattaaaccagcgagctagtgcctggagggtctggaaaagcagatctagaacacagagagccagatctagaaagagagaatgctttagacaagagccagaaagcatgccacgtgacctcaacaggcttacaagtgcccagggtagatctcagtgcgcagcgggcagggtacacacgtcaggaccccgcggagccacagagagtccagcagcctggcagaaaccacatcccatcccactctgtgcctgtggcagcgcccccatcagcctgtggcagcacctttccgtgaactctaggggaccaaattcttctctccaaagcctttttggcagatgccagcacgcagtcattcacggttgatggttgggaaaaagaagctgttagccatcccaggtctagggagcacagcaggccctgatctggaaacaagaaaaccaccacacacagctcacaaggcagaccacacaattgtggatccagaagcctccggatgaggcagaagatacctgggagatgtggatggacaaccgtgccatccagaaacacccgcagagtctagaaaacccagcaggtgatttagaaagggagaggccacagtgctggctggcaggggatctgtagacaagggtctcatcccaagaagaccccgtccagcccagcacaggataggaggacagcctggggacagccagggcactgcaccatgtggacatgcatagtggacccctccagaaaacaaggaaaccgatagagtggggagaagtgcccgaggcatgcagaaagaagaacatgtcagctgcaagaccagaggctggtcatccggacgccaaaccatcagatatgcagaaaattaggaaattgcagtctttcccctgtctacattctctttccagaagagtggttcccccgacaaccacatgcacggagactctggccctctgagcaagggagtcccctattcaagccttggggtttctagaacaccagattgtggacatcagcccagggatcgtgctgactaccatgttcttttacagatgtggaaaccgaggcctagagagggtcagggacttgcctgaggtgaccccggcggcctctgggcattttgaggtttattctcgcatagctccctcacctcatcagcttgtggggagccgatcagagatagctgtggtcccctgggcagcttcctgttggcctgtcttagaattttgctatatttggggggtgtgaagagtggatatagatgtgttaaaactgtttaaagtggagaaggaggaccgggcctggtggttcatgactgtagtcccaacgctttgggaggctgaggcaggaggatagcttgagcctgggaggttgaggctgcagtgattgcaccactgcactccagcctgggcgacaagagtgaaaccctgtcttgaaaaaaaaaaaaaagtggggccgggcatggtggctcacacctataatcccagaactttggaggctgaggtgggtagatcacttgagatcaagagttcgagaccagcgtggccaacatggtaaaaccccgtctctactaaaaatatgaaaattggccaggcgcagtgactcacgcatataatcccagcactttgggaggctgaggcaggtggatcacccgacgtcaggagttcaagaccagcctggccaacatggtgaaatcccatctctactaaaatagaaaaattagccaggcacagtggtacacacctgtaattccagctactcgggaggctgaggcaggagactcacttgaacctgggaggtggtggttgcaatgagccgagattgcaccattgcactccagcctaggcggaaaaaaaaaaaaaaaattagccaggcctggtggtaggcacctgtaatccaagctactccagaggctgaggcaggagaatcgcttgaacccaggaggaggttgcagtgagccgagatcacgccactgcactccagcctgggtgacagagcgagactccatctcaaaaaagaaaaaggagaaaaagtcccactcccattggagtgagttcatttcccagatgagagcccccaggagccaggacaggttggagtccccactgtcacccagaacaggggcgggcactcaggaaatgcttgacgaatgacagagtgagccccacttgtccacctgttctttccaagccctcagtatgcacaaggcaccaccatctgggacacagatggatcaacctacaacacccctcaacacacacaaacccttaagctgctcacagtctttccaggcagtggagtgtagtagagacaggctgcctggattcgaatcctaactttgccacttagtagctatgtgattttgggttttatttatttatttatttatgaaacagtctcgctctgtgtcacccaggctggagtgcagtggcacaatctccactcactgcaacctccatctcctgggttcaagcagttctccctgcctcagcctcccgagtagctgggatcacaggtgcccaccaccacacccgactaatttttttatttttagtagagacagggtttcgccatgttggcctggccggtcacaaattcctgacctcatgtgatccacctgccttggcctcccaaagtgctgggattacaggtgtgagccactgtgcctagcctagttgtgcgactaagcttgactaaacttcttgagctccgttttctcatctgtaaaatggggataatgacggtccctatgattgaacacgttaatgcatgtagagggtgtagagccgtgtctggtatacactaagccgtcagtatagacagtagtagtagttgttgtcattattgccgggaggagaccatgatgaagaaccacaaaggaccatagcacaggatggaaaattagaaaatgctcatggcagccccagggagcctgcaggggaacccagggcctggctttaggggtggaggtcagggagtgcttcccagaggaagtggcagttgagtcccacagccataggatggccaggaggtgaggaaggcccttttcaaagggagagtgtggtttgaggcagggtgagggagcggagagtcatgctgtgtgtctcccccagctttgctgtctgcatgccgacatgctgggctcactgggccccaaggaggccaagaaggccttcctggacttctaccacagcttcctggagaagacagcggtgagagaccttcaagctgccccaaccctgcaatccctgtttgggcctgcagagtcaccatgcggtccccagcctctgccctgagggcagctgctgacccaggccttccccagcaccctcgcttagaccagggttcctggcagtcctcccggcctgcatctcagcacaccaagtcctcctcttcaccccattctctctcttgagcaggttctccgggtgccggtccctcccaacgtcgcctttgaacttggtaaggagaaggatgggatgagggagaggtgtctagcggggaccacacctcccaggaggccaaggggagggaggccgcactcccatgctctgctcggacagccgagattcattcattccttcttggcagcggcctcaggacgtgtggctgttggagtccaagggtgggtggggaccgtggtccaagccaccagggagctggaccctagcccccatgtgtgtccctgcagaccgcactagggctgacctcatctccgaggatgtccagcggcggttcgtgcaggaggtggtgcaaagccagcaggtagccgtgggccggcagctggaggacttccgttccaagcggctcatgggcatgacgccctgggagcaggagctggcccagctggaggcttgggttgggcgggaccgagccagctacgaggcccgggagcggcacgtggcggagcggctgctcatgcacctggaggagatgcagtgagtaggccagccctggtgggagcgtcgcccctccccagcacaagggcacccgtgctacctctggcatgttccatcccgtttgcaggttccctcttcagggtcagagttcatttcttggcactgggggtcttcctctaccctggtgttttaactcaccttgaatccgagtcttccctttccagctttggggttcccttgtcatttctgggtcttgtccatgatctggcacttggatcccatcctcctggatgagagacctccctccctcttatgacagtccttcccaatcccttccacagtgtcccctctctgtctctcttccccctgcctatcccaggacagcaaccctgagatgtatcctgggtggatggggaccccaggcctagcaaatatgtcacaaacatctctcttcctcctacagacataccatctctaccgacgaagaaaagaggtgaggggggcaggggaggcgtgcggcctcctgggtttgagggaggagggggctgagggcctggactcctgggtctgagggaggaggaggctggggggcctggacgcctgggtctgagggaggagggggctggggggcctagacgcctgggtctgagggaggagggggctggggggcctggacgcctgggtctgagggaggagggggctggggggcctggacgcctgggtctgagggaggagggggctggggtcctggacgcctgggtctgagggaggagggggctgggggcctggacgcctgggtctgagggaggagggggctgggggcctggactcctgggtctgagggaggaggaggctgggggcctggactcctgggtctgagggaggaaggggctggggggcctggacgtctgggtctgagggaggagggggctggggggcctggacgcctgggtctgagggaggagggggctggggggtctggactcctgggtctgagggaggagggggctgggggcctggactcctgggtctgagggaggaaggggctgggggcctggactcctgggtctgagggaggagggggctgggggcctggactcctgggtctgagggaggagggggctgggggcctggactcctgggtctgagggaggaggagcctggggcctggacacttgggtcctgggcattgggtaacagcccttgcccctgtccttttgaaccctctcatctctcctcagagtctcacaggaagtagttgtggggtcaggatgggaaggccgggcctctgcctctagggggagagagagagagtgtgtgtgtgagtgtgtgtgtgtgtgtgtgtgtgtgtgtgtgtctttgtgtgtgttgagccctcactgtcccttccctacagtgctgccgtggtcaacgccattggcctgtacatgcgccaccttggggtgcggaccaagagtggagacaagaagtcggggaggaacttcttccggaaaaaggtgcttccctcagtgccccgtcctgaccctttcctctccagagacgccctgggagcctcatgactctggatacctagcgtcaaattctgctttgttgttgtctcagagatgcttagcctggtcttcctccccgccctctcacaggtgatggggaaccggcggtcggacgagcctgccaagaccaagaaggggctgagcagcatcctggatgccgcccgctggaaccggggagagccccagggtaaggcggctctggcctctgccctcccctgtcttccccagctgctcccactcactgtctcattctctctcgtttcagttccagattttcgacacctcaaagcagaggttgatggtaatgtacctgtagccatagcatccatactgggggcctgtgtgggagaggctaggacctggacgcctgggtctgagggaggaggggctgggacctggacgcctggttctgagggaggaggggatgggggcctggacacctgggtctgagggaggaggggctgggggagctcctgggtctgagggaggaagggctgggcctggacccctgggtctgagggaggagggactgggcctggacccctggctctgagggaggaggggctgggggagctcctgggtctgagggagggaggcctggggcctggacccctgggtccgaggtaggagggattgggcctggacccctgggtctgagggaggagcggctcagactcggactcttaggtctgaggaggaagggctgggcctagacccctgggtctgagggaggaggggctgggggagttcctgggtctgagggaggaaggcctggggcctggacctctgggtctgagggaggaggggctgggggcctggactcctgtgtctgagggaggaggggttgagggctcctgggtctgagggaggaaggggctccttgtcatggtggggaagggcctgagcacagcctcttgcatcccctggcggttgtggatttgagttactgttctcttatctccctctttctccctcactgtctccccagccgagaagccaggtgctacagaccggaagggaggcgtggggatgccctctcgggaccggaatatcggggctcctgggcaggacacccctggagtctctctgcaccctctgtccctggacagcccagaccgggaaccaggtgagagtttcctgggccagggctccatgaggcccggcgatccagggtgggggtgctgcctgcccccttggcacccccagatagaagccattccccagcaacacctcccctttgctctcagcatccacttctccctgctcctggtcaccactgtcattcataactttccccttccctcagtttgccctttccacagctttgctcccaggctctgacctctctgctggtgctgcgtctcccacccccttggactacgttttccatcaacccttccttttccagaaccttccctgagtacatgaccagtccaccctctgagctgcattgctggccccctaggtggggagcccgccagccccatgagcttcatccctcaccatccttacactgctgtggcctcaggcccttggatctctgcatggccaggccagggctcacacaccagctctgctgactgcttgtgtttatttagtatcttggatatgactcccctttcttagcctccgtttgcttttctctaaaggagtatgagagggtggggaggatgaatggacgtggaggcagcacagaatccagggccctcccgacctcagggggctgcagtctggttgggtgggagagatgtttgtgacctatttgctaggcctggggtccccatccacccaggacacacaggggcacccacttctgttgcatcttcatgctcctgcccctagtggccatgttctgagaggtcttaacatctgtccgtcccgtgctgaagtacagagcagccatgtggtgtctgccaggcactgggtagctttagcccccgcaattccaggcccccagagtgtgggtctcgtggccgcagaggccttccagccagccctgctccctccaccccacaggtgctgacgcccccctggagctgggggactcatccccgcagggcccaatgagcctggagtccttggcgcccccagagagtaccgacgagggggccgaaaccgagaggtgcccaggctggggtgcaggggcgggaggtgtggcttactgggcgctggtgggtgggtgcagggtcaccgctgccatctgtgcctgcctgtcccaggctcttgctccccatgctcctctgctgctctctgggtctggccattcctctcccttcttctttccttttctcatctccctcctgcttcctcattgcccccctttccttttatccttcctttttcctctgctccttcctctccttccttttttcactaatccttctcctcctcccttcctctccaccactccttccatctcctttatttccccctcctctctcacctcccctctcctctctcacctcccccatcctctctcacctcccccctcctctctcacctaccccctcctctcacctccccgctcctctctcacctcccctctcttctctcacctccctcttcctctctcacctcccccctcctctctcaccttccccctcctctctttcctccccactcctctctcacctgggttttctttccccaccttccatccccctccgatctccctgccacttttcattttttcagcccttcctccccttctctttcaagcccccctgccccctgccccccaccccccgcctcgctcctgcctcctggtgcccgtccctcaaccccccacccctctgctctgtgccctgggggccctgtcccccttacagctggggggcaggctctgcctcctgcccgtccttgtgccgctgctttggggaccctttggtgggtgcggggaggtgggtcaggttccatctgggcccacctctgaccctgtgcccctctctccccagaaggtggaagaggtgggtgcctgggccctgggtgggggaagggctagcccctcccccatttctcccagcccctcccctctccccatggccactccctccccttcactccctgtgaggggtgggtggggacatcaccctcccagttgaagagctaagtatggaaatcctccccaccccataacaccccctctgttgccatccccctgcctcagggaagggagggggtcagtcctatgctccatcctgggttccccatcccttcccccatcaaatttcagtatcccccctcccccaagaccccccactaccccagtgcccctaaaatcccaccactcctctgactctctcctctcttctgttgcatgtttgatccctgtcctggtcacccttgccccggtcctggtctctccctgtctctgtccctgtcctggtctctccccgtctctgtccctgtcctcgtctctccccaatttctgtccctgccctggcctctccccacctctgtccctgccctggtctctccccgtctctgtccctgtcctggtttctcttcgtctctgttcttgtcttggtctctccttgtctctgtccccggcatctgcctgactctgtccttggcctcggggtccaggctatcagggcgtctggggcgctcagagagcctgcgggtgagtgaccgccgccggccttcccggggcagcctcggggctaagggccggggtgggggccgctcccggagcgacgtggacatggaccccagttccgccacggcagtgcttggccctgcccgacgagccacgtatgtcaaccctctcccttcccccatccactaaggcagcctggagaatcagggagggattgttgtcagagtcacagaggaatgggcgttggagaccgaggtcattgaggccaactgtggtcacagaccttggaggaggagggggtagaatgcttctagagatctgggaactctagtgtggtccgatctagagacctggtctgctgcacgggccaccctgcgggcatcgaatgccaaggccactgaccggggttgaacgctctaagaggctgaaggctgcttcttgggatggcccaagctggggccctaacaaggcctctgtccacagccccgagcctggagatgagggggagccggggcggtcgggactggagcttgaaccagaagagcctcccggctggcgggaactcgtccccccagacaccctgcacagcctgcccaagagccaggtgaagcggcaggaggtcatcagcggtgagtactgcccccatcaccccactgtggccaaggacacagtccagctctggcaaaggcaaagacaggcgcagagagatgttcatcttggtgtcatttaccatcgggagaacttgaaggcagcttcaaattccctcttgttccaagttcagattgtttcaacacagagcattttgatggaatgtgaatgccactgtggaagggacatttccaaacatttctagtagtgcaatacagtgctgatgttgagaacactgcatttctggtgcaagcttttatttccttgcttgtgaaatgtgggcattaatagttcctacctcagatattgtcatgaagatgagatgatttgtgtgaaatgtttagcatagtgctgggcacagaggaagagcattttattttatttatttttttaaatttttatttgaggcagagtctcagttggtctctcaggctggagtgcagtggcacaatcacggctcactgcagccttaccctcccaggctcaactgatcctcccacctcagcctcccgagtagctgaacaggcatgtaccaccatgcctggctaatttttgtattctttgtagagatggggtttcgccatgttggccaggctggtctcgaacccttgggctcaagtgatcctcctacctcagcctcccaaagtcttgggattacaagtgtgagccaccaggcccagtcaaggaagagcattttaatgagattgttgttactagtttgatcttaattgcttaggggagaaaagatccccacaggggaaagtttgggagaatgatcagtatattagcagtgcttgcttctgcgtggagagatgatgagtgtatcatttttgtctttttccttttttcctttgctaattgtgtggtggctagggaggctggtggcaaaaagagaaagctttttttttttttttttttttaagacagagttttgctcttgttgcccaggctggagtgcaatggcacaatctcggctcaccacaacctacgcctcccaggttcaagtgattctcctgcctcagcctcctgagtagctgggattacaggcatgtgccaccacgcccggctaattttgtatttttagtagagacggggtttctccatgttggtcaggctggtctcgaacgcccgcctcagcctcccaaagtgctgggattacaggcgtgagccactgtgcctagcccaagagaaaggtttgggacttgactgaaagcttatttacagattacttcatagtgaaaaagatacttattcaaaaattttaggggagtagttgagtactttttgggtcacagatccttctaaggacatgataaaaaaaaaaaaaaacatgagccatgtgctacccattaggactttctggaagatggaaatgtgctttatttgtactgctcaccatggggaccatcggccacctatggctggtgagcacttgaaatgcactaggccaggcacagtggctcatgcctgtgatcccagcactttgggaagccgaggtgggcagatcacttgaggtcaggagttcgagactagcctggccaacatggtgaaaccccatctctactaaacatacaaaaattagccaagcatagtggcgcatgcctgtaatcccagatactcgagagagtaagccaggagaattgcttgaacccaggaagcaggagatggaggttgcaatgaacccagatcactccaccacacttcaatctaggtgacagagcaagactgtgtctcaaaaaaaaagcactaaatacaactgagcactgacttaaaatttcattgcaattaacgaaaatgtaaagagttgtacacggctggtgactatcacgttggacaggatagcaatttctttccccagaaagaatatgcataatgtacaaaatcgtgcttttagtctcaggggacttctagggcccctgaaactcacacatatgccctccggggatgtgggggtccctggatctgaggctgtcaaccactgtataatgtggcttgatggttagacactaaacacagctgcaagcttgctggcaggtgggatgactagcttgtccccatttgctcaggatattcacagttttatcactgaaagcccaggcaggcaaatgaggaccattggtcactctggccagctgccacagcgaaaagggaaaggcagtgggttgaggaatcctcactggttttttttttttttttttttttttgagacgatctcgctctgtcgcctaggctagagtgcagtggcgtgatctccgctcactgcaacctccacctcccaggttcaagcgattgtcctgcctcagcctcccaagtagctggaactacaggtgcccaccaccactcctggctaatttttgtatttttagtagagatggggtttcaccatgttggccaggatggtcttgatctcttgacctcgtgatctgcccgcctaagcctcccaaattgctgggattacaggcatgagccactgcacccggcccctcagtggctatttaagagggcaaatgactccacccggagagtttttttttttatttgtttgttttgttttgtttttttgagacggagtctcgttctgtcaccaggctggagtgcagtggtgtgatctcagctcactgcaacctctgtctcccgggttcaagagattctcctgcctcagcctcccgagtagctgggactacaagagtccgcccccacacctggctaatttttgtatttttttagtagagatggggtttcaccatgttggccaggctggtcttgaactcctgaccttgtgatccacctgcctcagcctcccaaaatgctgggattataggcatgagccactgtgcccagccattttgttttgagacaaggtctcgctctgttgcttgagctggggtgcagtaatgccatcatagctcactgcagcctcaacctcctgggctcaagggatcctcccacttgagcctcccaagtagctgggactacaggcacacaccaacatgcctgggctaattttttttcttttttaaatttttggtagaaacagggtttcaccatgttgcccaggctgatcttggactcctgggttcaagcaatcctcttgccttggcctcccaaagtgctgggattacaagtgtgaaccaccatggctagccagagagagttttttcccaccaacttctaggaagctttcctccctgctctgcctcattcctctagcctgcccatgaggtcatgccccctagtctgcaccctccccaacatgcttcctgctttggtggccctgcagagctgctggtgacagaggcggcccacgtgcgcatgctgcgggtgctgcacgacctcttcttccagcccatggcagaatgcctgttcttccccttggaggagctgcagaacatcttccccagcctggacgagctcatcgaggtgcattgtgagtgcagagccagggtccctctgtgtaccccactgccccacgggcagctctgctctagccctgggttcaacctgctcgggaaccccagggttcacatggggtgggggcagatacgccatccggtcccgaggatcagacacagacacacctgcagccctacccccaccacaccgcagcaggccccgcacagcatcttccagaccctggtggagcatccctttcctcctgcccccacagccctgttcctcgatcgcctgatgaagcggaggcaggagagtggctacctcatcgaggagatcggagacgtgctgctggcccgggtgagatgcccagccctcccgctcctcccagctagacacatggaattcaggcccgggacgggtcctgagcccaccctactccagtcccagggtctgggcttccagcctgtcgtactttagtccctgttcttgcccatccccactgagacacctgcctggcctgaatctcgctgtagtttgatggtgctgagggctcctggttccagaaaatctcctcccgcttctgcagccgccagtcatttgccttagagcagctcaaagccaagcaacgcaaggaccctcggttctgtgccttcgtgcaggtgaggtggggtctggactccagcttcccagggaggaggggcctggagacccagactcctaggtgcctgcgccctggggtgagcccaaagcctgggccatcgcaacaccagcatgtttcccgcaggaagctgagagccgcccgcggtgccgccgcctgcagctgaaggacatgatccccacggagatgcagcggctgaccaagtaccccctgctcctgcagagcatcgggcagaacacaggtaccgcgggcctggatctctgggcctcggctctcctcttttttttttacattttttttctcactcattttcatcagtgataccatcacagctcactgcagcctcaacctcccaggatctaccatcctcccacctcagctccccaagtagctgggaccccaagggcacaccaccatgcccagctaatttttttagtttttttttttagagacggggtctcgccatgttgcccaggctggctttgaactcctggtctcaagctatcctcccgcctcagcctcccaaagtgcttggattacaggcgtgagccaccatgcccggccagctgtcctttgtctaaccttggctgcccaatctggagcctccagggcaggggttcaccagagctgctctctcccttgcctgcagaagagcccacagaacgggagaaagtggagctggcagccgagtgctgccgggaaattctacaccacgtcaaccaagccgtgcgtgacatggaggacctgctggtgagcctgggctggccccacacccgggacagtggatggtgtgagagcagggggtggaccctacctcagcctgtccagaagtcacaccccaccccttggcttgtctccctcaagggtcactgtgtccaggggttggcttggccctcagcatctccctctcagggtcattggaggtcaggcccaaccctcagcttgcccgcatcagaagttggtcttggctctcatcttaccaatgtgggtcactgcaggtcagccccagcacttagcttgtccccataatgctcccgtctctgccccagaggctcaaggactatcagcggcgcctggacttgtcccaccttcggcagagcagcgaccctatgctgagcgagttcaaggtgtgaccataccctcctgcctcccccgcccccctactccttggcccaggggattctgtgatacagcccccagcctgtcctgcccatcccataatacacccaggaagcgagagctctgtcccccacctcatgccaatcccatgatccccagcctgtggtcatccccggccactgccctgcccttcccctccccaccaaccccaatcaccccctgccaacctgcacaaaccatcaccccctcctgccccagaacctggacatcaccaagaagaaattggtccacgagggcccactgacgtggcgggtgactaaggacaaggcagtgggtgagtgccagagcagctgcctagtgcagggtgttggggcagtgagccaagggcggggagggggtcgcgcgggggcacgccgtgtgagcactgctcgccccgtagaggtgcatgtgctgctgctggacgacctgctgctgctgctccagcgccaggacgagcggctgctgctcaagtcccatagccggacactgacgcccacgcccgatggcaagaccatgctgcggcccgtgctgcggctcacctccgccatgacccgcgaggtggccaccggtgagtgcagccactgcatggcccagggcagagggtgtcttttttgggcagagctgcctgtggagtggggagcagaaccctctagagagccagggagccagcattctagcaaagaggttgagaagtaggtggaggtgggcagggcggggccaggcctagagggtttataagtgaggtaggaactgctgcaggtgtttgcacagaggcgtgtcttgtgtaaacaaggagaagaaaggccaggagtccagtgaggagggatttgtaaacatactactaggaagttgcaccagggccacaaacactggaagcggctggagggtgggagtggctggaggggtttcgttaggtaagccagggtacatgcccgattccataaggaggtgtgagaggtggggctcaggaggacacatcgggccctggatattagcagacagtgagtggtgagttgagccatgggagccctgagagcgccaccactgtgggtgacttctccagcttgtgcttagggaggggcaggcactggggggacctgggctctgagccccatctccccctctccctgcagatcacaaagccttctacgtcctttttacctgggaccaggaggcccagatatacgagctggtggcacagactgtgtcggagcggaaaaagtgagggggggtctgagttctgagtgtgggtggaggacgcccaggtttctgggttcccagggacaggagggctgtggggaggccctggcatagggtctgggggctctgactgcccagggatttggcctttctccccagctggtgtgctctcatcactgagactgccggatccctgaaagtccctgcccctgcctctcgccctaagccccggcccagcccgagcaggtgaggggggccatggagagagctggaggttcagggagtggggccggaaggcggggcaggcttccctccacaactccagaaccgtctctgtgtgagcatgcacatgtgtgaatgcatgtgtgtgcatacatgtgtgtctgtacgcaagtatgtgactgtgcgtgcatatatagtgtgtgtatgcatgcatgtgtgcgtgtgcatgtgtgtgcgtgtatggtgtgtgtgtatgcatatgtgtgcatgcgtgtgacagcatgtgcatgcatgtgtgtgtgtgtgcgcatgtgccgaccccaccactgccccgtctgtctcctgtctccaggcctctgtgtcttccattgtctgggcctctctgtctccctgtctcccggcctcgacctctgtctctgtctccggacctccctgcctccccacctccagctctctgtctccctgcccctgcggccccccagggccaggggtgtggggtcacccagcacttcctcccctcagcacccgagaacccctcctcagcagctctgagaacggcaatggtggccgagagacgtctccagctgatggtgagaccagagggatgctgggtgaggggccaggttggggctgccgggtgaagagaggcatccacaggaggcccggcaggatctgagctccctctctgttccccaatccagcccggaccgagagaatcctcagtgacctcctgcccttctgcagaccaggccccgagggccagctcgctgccacggcccttcggaaaggtagcccagctctgcccctccagggtggccaccagcccaaacagtgcctctgttccaactagaacaaggctctccacgtcaaaaatttccttacgcccagctgccagaaaacaaatgctccaaacccacccagcctgcaccactgtcctgggtgcccacgtccctcttctgcagccaccatcccttgcttgattctatatttagcctcttcctgaacacatctctgtcttcagtaccttcctgccctgtcccaaccctaaacccagcctcacttcttcacctccctttggatccccgaaccccatctgctcagccttgcctggcacccaccttcacctccagcccctacacatcccctttggaatcccccatcccagatcccagcccagccccctggtctcctgactccacccctccttgcccctggccagtgctgtccctgaagcagcttctgtttccggcggaggaagacaatggggcggggcctcctcgagatggggatggggtcccagggggcggccccctgagcccagcacggacccaggaaatccaggagaacctgctcagcttggaggagaccatgaagcagctggaggtggggcgggacgggccaggggtgccctgagtgggctggggaaggaaggggcccccctcatccatgacccccaccccaccaggagttggaggaggaattttgccgcctgagacccctcctgtctcagcttggggggaactctgtcccccagcctggctgcacttgaggttcccgcccaggaaggtgagtggggcacctgggggccagggcgctgtcctgaaaggagggtccccctccagagctcgcatccctacagccccttctgtccatctccctctttgtcttttctgaatctccccactccacctcgtgtttctcatctctgtgtctctgtttctgataatctgtttctctgtctctgtgcccgcctgcctctccccacctccccttctctctctgctctccctgtcttgtctctgtgtctgtctctccctgtctctctctccatctctccccgtctcccctcttctcctacatcccccaggccttttgcaagaaggagaggaatgggggagaggacgtgagggaccacccccacccacacagctgccgcagcatctcacaccccgagggcctgaggagagggagctgtgggccacgcctgggaggggcccagctggggttactggccccgcatgagcctcggccatctctccctcctgccctctgcttgggggactcagggctccattctggagggcaccacggtgacccgggccatctcagtattgcctgtgggggccacccctccacccccacccccaagtgccttcgctctgtttttataccctgaattggaggtttattttttaatatatattatctaagaagagatctgtgtgtgtgatggcggggtggggcctggcatggcgtctggaactctctgtgactgtctggcgttgacatcctgggtctgtgcctctgcgcctccctccagttgttcattcattcattcattcatttctttgtttgaaccgttactccccaggcactccgtacacacactgggtatgaggcgtctccctgacaccgccctccagctcccacccccgatcccccatgctcagcactgggcaccccgagtctcactctctgttcttttatttctgtagtaaactctctggaggtgactgttgggatcatggggagctggtggggaggggggcccctcctgggtgggggctgggggcggggttattgctctgagctccctgtccccaggggggcctatatggggggggtgtcaggactggggccagcacagggggtttggagacacggccacacaaacacttggggcatagcacaggggtgggcgggcggggcaggctgggcgccatattgcactttgggagtggggccaggcggggacccccctcaaactggagcctggggaggaggccggaggccatcacattccctctgtcctctgtggagggggaagtgagaccccccccactctggggctggggaaggagactggggcagcaatgtgcccagacctgggaggtgctgagggctggtcctgggccttgggccaggcatcaagggcagacgggcagccaccctggtccctgcctcagcagaatccattgccccctgccggctcagctgccggtcccccctttgcccgcctttgccttggggggtgccgggagaccctcatcgccctcgctgtcagagctgcagccgctgacgtcggtgatctccagctccgagtcgctgtcctccttcccaccaagggcagcctctggacccccagcccctggcagcgccaggcgaggggccgctgccaggcccgaggggcgctcggggcccaggccctcccctgtcgaggccagcaggggcgtggctgtggggcctccccctgcccctgacgagggcaggtggcccagggaactggccagagggttggggtagaaatgcggggggtagagagagggaggcagcttggggaaggggcccgtgaggtacgggttaaagttccaggggtactcagggaaggcgcggccataaggacccagcaggccagggggcttggaatagctggtggcacctggggggcacaggggtaggtcaggctggggcacctgcctgcctggggaccagtaaagggggctgcctccctgccatatcccaccccatctccccgcatccctcctacatggcatcttaccccctcatacagcttcccccaactccatctcctcccactcccccacttgtcttcccattccttaggcacccctgaaagcccctgtctccctcatttcccctccctcacatcacatccttttctgggttttacacacacacaccctacaacctggccctgggcccccttccccatctcttctcttgtcttttctcatcctcttccctcaagcctgcagcttctcccactgtgcccccagcaccccagaacctccaggctcttaccagagcccaggaatgggaaagggctgtccagacgcaatttatctgtctcggaggtgaacaggggtgtccgggcccctggctctcccaggcgtggggcagagaacagggtttgcagggtctagagagggagtgggagaagccgcccttctcagactgtcccctccccagagtgggcaccaagtgcctcggttccaggaccccagtacccagactcacctcaggggtgaggggaggagcatctggccctggggcccccccaaagggactgggggtcagcaagagtggggagccagtggcagctgccgccatgtccagcagcgggtaattgacaagcacgactttgctgaagttgaacttgtaggtgaacctcttccctttggtcttgtggagaatccgcttgttgtagtagtaactgtggggagagtggtggtgttggggaggtgcagggggagccctggggcgggatctggggtttcttaatgcgtgtgctgtcccaggcatggtgcacagagcactagaacttggggaaactgaggctcacagaagtcccttaatagggatcacagggcaaggaagggatgaggcaggagcggggaccctgccctgcaagactccaaagcccaggtttaggggtccctcctcctcgcctcccttccactcacaagtagcgatggtggctactcacgcacagccctgtgccttgtgggatccagcaggaacctgccccaggatgcagagggggcaccagagggacagttgggggaaaaggacaaggtgggatccagccccaagcccttcctcaccgcagggcccggctcagcttgtcgtaattcatgtggggcttgcatttgcgaataccccacagccgggccacctcatcggggtctttgatgacgaattccccgtagtccccctgccaggctatgacgccctggtactcctccttctgcagcagctccaggataaagtgccacagctggatctgcctcgagccaggggatgactctggcttgtaggcccaatccgggaaggcaaaccctggggacgggaggcagggagtggcctggggtcaggatgccaagtccagggctctgggtcctgctggactcagtaacctgggaggcatgtagttctcctccagtctcaggcatctttagggacctggtttccacactccaaacctcctccctttgtgtctggtccccaaattacccaaataagggcaagaacccagtcatccagggaccctgggttggtaccagtctgatcccctaccttggcatagctcccccaggctcagcatccagaggtggagttgggagggactggcttcctgcacccatgacagtgaggaggaatggggaggggcacccgcctccaacagcgttagtcctctcactgcccccagccagccctaggaggtctctagtctcttgtaccctgcggtgccctcagctcttactgtctctgttccccattccctgtcccctgctccacctttcgacattccccagagccccccactgacccatcctggcatatccaggctgcagctctgtgcatgtctgtacctgcctgtgtatttgtacctttcccgtccctgtgtcccctccaccccatatccatgcccatgtccgtccaagagcagtccagaacgatgtgtgtgtgtgcgtggacacacacatgcccacggaagacatgtcacacagacatcagttcacttgcctgagacacacagccacactgggacacaggcacaccggagtgccacactcatgctgggggccaccaaggctgacatggcagacacaggctgcgcaagactcaaggtcacgtcatctcaacaaccccacagtgcacacccatcacaacacagaattacacatctcaagactgggacttactaacaacacaaatgcctgacaagacacacacaggaccccaaatgcccaaagaacacactgtacgatggagacggtgaacacagcaccaagatatccatgtccccagacacacagggtgacagcatgtcagtagagcaacttcccaaacctgcacacagaggcacccacatgtcagcactgacacccccggctcactcagcatcacgtctcacatgcagaggggagtactccactgtccacatacccccaggagctgggcaccccgaaatctcatctcccatgcagaaggccccaagccctgggtccaacttctgtgttcactcttatgccacatcctctgtccccttccccctcctcagagaccccagacccaggcatgaaaatagaaggcagagtgagtccataaaaagctggcagcagtgcaggagagaggagactgctgtgcgccagggcaggggagaccagcatcgccgtgtccacttgctgtgtgattacgggcaggtccttaccctctctggtttagaactgcacaggtggaaggcaagggggcgcagggtcccacccaggctgcctggtgtagaaaagtgggtgcttgtgcctcccggcctgaaggccggggagctccaggcagtctccttgagggagaatttttatctccattcatttttgggtctttctcacctcccatgacagggctggatccagactccagctctgacccattccacacccagaacacatcctactggggaggcaactgtatcacagacacacccacaggaccccaaggtgacaagaggacacccaacccgatactccatctgtcctcaaatgcacaccctcaaatatgttgtacctatgaggcacaggcacagctagagagaggacccccaaactcagtaggcagacacacacatgtgacagacaaacccccagaattcactcatgtgcacatggaccctacgctgaaaaccagacacagcccccaacacagaggcccagggatgcatcccccccacagccccaaatgcaccaagacagccatgcggaacgccacacaacccgagacagaccgcaagaaacaggcaaaggctcctcaccccactcaggcagaggcacagtcggagagctggcagacgcccccatcccaaaatgcggacacgcccagcccagagacactcaagtagcctcagatgtgcacgtacaagcaaatacacaagctcacacaaagacaggctgtgcagacacattctcccagtgtgaccccttctagaaacactgaagtgtgacacagggacacactgaaatgagaccccaaataaccaaggacagagtctctgtctgtctctcacacacacacacacccctcccgctgcacatcagcatggtgtctgaccagcttcaccgtccaccaaccccggttgcaagctgtcctctttcctgggtctcggtctggccgggtcgtgcctgcacgtacccctgactgggcagtgccgtctgtctacctgtccatccgtgcctggcctagtgccccctccagcccagtccctgctctcttttccccgcaggtcctgcgtgggagcaggctgagacgtgcgtggcagggatgcccgggcctcgggcccctccgtcctcacccctcactcacttccgtaccctcccagaagacccacctatccccccagcacgcagggggcaggggaatctggctgcgaagtttttagccaagtttctcagaaggggtttgatttgggggactgaccaagactgagagagaaggacccacggactagagtgagacacgtggagacacggagagaagggggatgcggctcactggggaagcctgaggggtgggggaaggggtgggggaggtccgggccagttaccgggggtccagagagccggcagggcgggcggggcgaagagaaggtcggagacgcagctacagtccatggcggagccggccctgcagaggccgggagggacacacggggacggggtgggcaggagagacagacacaggtcagccagcggggcgctgcccggggccttcccctctcccaggtccccaccccagcctgacaccctctccccgcaatccctcctgcccactccctcccgcaggcaccgctctgtccccagccgttcccggccccgagaccccgttccttccctcccagcctctcctcccgcagcctcctcctcactcggtgcctccatcactaactacgccgctcccagcctccctccccgctccccgccactcgctcacgctctcacactcgctggctctcacgcccgcccgcccgcccgccgctcgcgccccgcaccgtctctgctgccgtctcccgtccccgctctcccgcctgacctcccgggtcggtcggtccctgcgtctctgggtctccctctgtctctctctctggctgccccagatttatcttgttctataacttgcccccacacccgccccacccggacgacccccaggcgggctcttccagcccaggcgcagccctgacccgcagccgcccaggacgggctgcaggggggcaggcccagcaccccctcctccagtcctctaccccacagggcagcccccagcgccctgcaggaggcctccacagaccctagacctgctgctcaccctgaagacccctgtcacttggatctgcctccctcctcagacaccccttcccctcacatctgcctcccctgtcagaccccctccctcagacactccctctccctagatatcttacgcccctaagatactccatcccctcctcactccagtctccccgcacctttccccctcttatggcgcctcccctccacacacacacccttgcaatccactccctctcacacccctccgcagacacacgctgccctcgcgctcccgagacccctcccctcaggcacttcagcccctcactgccaccctcacaccccacctctggagcaccttcttcctggagaccccccagacgctctcaaaaacccactcctcttagacaccctgatactccccactgctcccatgcgccccccagccagaaacccctcagaccctggcagcccacactgtgttcccccgtgagccccgcctacccctggacactggacaaaacttttcagacaccccatgtcccctcagactcgcccggtctccccacagaggccccaacctcagatgcccccacctcccatctgcctcctggagcctcccctgtcccaggccccctctgttcccacacctgtctccccgtctttctccatctgccccgtctcggtatctctccctctccatctctgtctctccggtcacttggtctcttctcccttccgtctccccccaccatctcccttccatttctgtctctctcctccaccaagggggtctctctccccacctcactgccctctccctctcgtctccatctcctcctccacccctcagtctcttccctgtttctccatctctcacccctgcttcttctccatctgtctctccatcttcccagtgtgtccatctctgtctccctatgactttctccccatctctgctatccgtctttccctccccttccaccatctctgtctccgtctctccctccctttccaccatctctgtctctccctccccttccaccatctctgtctctgtctctccctccctttccaccatctctgtctctccctccccttccaccatctctgtctctccctccccttccaccatctctgtctctccctccccttccaccatctctgtctctccctccccttccaccgtctctgtctctccctccccttccaccgtctctgtctctccctccccctccaccgtgtctccccccctttccaccgtctctgtctctccccccctccaccatctctgtctctccctcccctccatcatctctgtctctgtctctccctccccctccaccatctccgtctctgtctctccctcctcttccactatctctgtctctccctccctccccctccagcatctctgtctctcctgtctctgcccccaccgtgtccctgtcccgcgtctctccagcagccccgctcccccacacctctcccccacccatcgctctcccacctcccgctctctttgcctctcagggtccccctccttcctccccccgcccccaccccctattggcccctctcatttccgtgttggttttgatttctcttcccgacgctttcaactccccgccgcctcctccggacacgttataacgaggagccgtgggatcggcgctccgggccctgctcccacgctccccccgccgtgtctcacacgcgtctctgccatctcgcagtctctgtgcccagccttcgtcctgtgtcaggccccacagggacctggacccctcgcccttgcccatcgcctctgccgccctgtccccgtccgtctgtccgtccctcccatctctgggtctccatgcctccctgtctcttggttcccacgtcgtctccacttctgtgtccccacgtctctgtgtccccatgtctctgggtctccacatggctctgttttaatgtctagggtctccacacccctgtctccgtctccacatctccatatctcctcctcctcaagtccctgtcctgtccccatgtcccccatctctgtctcatctgtctctgtctccatgccccatctccctgtctctgtgtctctgtctccatgtctccatctccatgtctctatgtctctgtctctgtttctgtcccggtgtccgtctcttggggtccctttgatctcaccctgcccctggcgcccccctggccccattgatcgctgatcgactgatggagggagcgcggcctgcggggcctggggctgcagggccaaacagggcctggcaggacggccggacagatggacaaacggccccagccccagtggctgtggatggggagcagccacaatcccccacccccctcccccccgccggccggcgtggtgcggatgggtactccaggcaagctttaatttttaattttattttgcttcctccacccccccttcgccccccatctctaccgcccgcagccatggcaccgaatgtgtgtgcgcatgtgagcgaagcggtgtgcagaggcgctgggcaggcgagggccctcctcccttctctccctgccaagcacaaccacacagacccacacaccaacccaggcacgcacaccaccacgtcccacacagcacacatcgcacagatgcacacaccagcacagccacacacacaccatcacataccacacactgcatgagcccacatgtcaacaaagtcacacacagcaccacgtcccacacaacacatcacacacaccaacaaagcaacgcataccactgctgccacacacaacccacatcacacagatgcatgtgtcagtaaagtcacacaccaacactgtcacagtcacacacacacacatcagcatagtcacagatgcacagaaacagacacacagttttacacaaatacacacatgacacatcaattcaatctcacacagaaacaaagacacaaaatcacaaatcctagacacactgtgtaaacacataatcacacactgaggctcacaatcaaatacagaaacccagattcccaagcacacaatcgcacactgagacaacagcacacagaaacagacacacagtcacacaaccaagcaccaccgaccctcgagcgcatacatatgcacttggtcacgcatggagccgtagagatacacacaccagcaccaacccagacagccaacgcacacggccacacacacacccattcacagacacagtcacaatcacacacacacaccaagatcacggacccaaacatacgaccgacagcggcccctgcagaggtacacacagacacacccagacacactgggtaggggtgggcactcagagatgaccccaacccaaggcccctgccactcctgctcccaccatccccatctgtctgcctgtccctccatctgtgaacttcccaagcatgtctctgcatgggtgtgtgtgtgtgtgtgcacatatgtgacacgtgcccttgtctcagacctgcttctgtgactgcctctcgagacacaggtctctcggtctctctcagccccttcgggtgtcggcgcatctttctgtctgtctctgtcactgagggtctctgtctgtctctgtcagagagggtcttttctgctcatcttggcctgcctgtctttctaaatatctccatctctgagtgtctctgtttcccccatctctctctctgggtgcatctctctgtctctctctgtctctgtccctctctgtctctgagctctctgtcatctctctctgcctctgtctcctaacgccccatcaccacgcccccctgggctggggtttaaccagttgttttgatttctctaagctgcgccggccgcctcgggagccgcctcgggcctcgcacccccaccaccagccccttcatccctcacccaggcccccccatccccacctccccttaacacaatctgcacaatcggaatgaaaattgattttttttttaaatttcatatcttctccggggctctgtctaaagaggagagagacgcggcctaagacccttctgccaccgccgcccccgcatgcacacaccatgccccaaagcacacgcacgcacgcacacacacaccctgactgcacccacccatggccacacgttcaggcacaatctggggacatatctctccttacgccacacgcccatgtaggacacatctgtgcacacagtagagacccacagtgacacccactagtaggcacacacacaccatgcacagccccagccatgggacggctgccagccccacccatctgttgccacacaaacgagcccccaacaccctgtcccatctgggtgcacgaagccagctccccgcggtcacacactgtgtgtgtgtgtgctcacacacctgtccgtccagactatagccacgtccatgtgtacacagagcaggctcaggggccggccctcgacaggcaccaggagaccctgtgcctgtcttggagaggagggggttcaggggtgatgtggggtttcctgcatgggcatgcccccccatcccggacgccacccccattcccacactgcccacatcaaatgctctggcctgaccctggttgggggtgcctttgtgcctggggtgtacacataccccacatgtatacgccacatatacaccacacataccacatatacacaccacaaacacaccatacatacacacccccaccacacacatacccaccacatacaccacagacacacctagccccacacaccacatacacacacacggtacacaccacatacaccatacacacaccataccacacacaccacacatacaccacatacacataccatatcacacacaccacacacatatcacacacacacataaatacaccacacatgcaccacctacacaccacacacgcaccacgcacaccacacacacatcacacacacaccacacacatcacacacacaccatacactcaccatacacacacacatcactaaccctcacatacaccacacacagtacatacactacccatcacagacaaaccacacacaccacatcactaaccctcacatacaccacacacagtacatacactacccatcacagacacaccacacacaccacatatccgccacacaccacacacaccacgtacacaccacacaccaccccacacatacacacaccacatatacatctaccacacacataccacacactgcatacacaccatacacacacaccacatcactctcacatacgccacacatgctacactacccatcagacacaccacacaccacatatccacacacaccacatacactacccattacacacatacaccacacacacatgcacaccacatacactactcaccatacacacatgcacaccacacaccacacacacacacaccgcatatacaccacacacatcacatacacaccatgccacagacactatacatcacaccacatacacaacactgcatacacacacccacacacattacaccacaccacatgccacacataacacacataccacacacatcacccacataccacacaccacactcacacaccactcgcagcttactactctcaataccacaccttgtaatccccacatggacacacacaaaaccagtcatccttaacacacagacccacagaaaacacacagaagcacacagggtgacaccagaaacagcttcacacacagacttcggcacaagttcacagaagttgcagacacatgcgccatccaacagccacacataaacatgcaaccacacaaacatacacaatcaaacatacacaaacagtcatcagtgctctttagggctggacacacagtatcactcaattgttatgaaccaacactcaagctggtacattcagctcctacaaattaccacccacgtgtgcacgtgcacgcgtacacacacacacacacacacacacgtccacatctgaacccagactcagacacaagcccacaagctcagagacacaacagcaacccccgaacaccaacacagcgccacacaaacacacagctggtctgtgacacacaagattttgggggctcttcctcagctgcgtccttcacacccacactcaccagcccagctgccggggtcctctcagggtcgcactcacttggtccttccaccctgtttctctgggactgagcctcctcatcttgccctcagagataactgccccaggtccctgaggcctaccctgcacagccacaccatgtgaaaacaccagacatggcacaactccagagctttggacggtcacaccagacgcagctgagcaccacacacgtcacacagacatgacacgctcacagacatgatacgcccagacgtgacgaactcacagacatgacacgcccacagacgtgacacacccagacatgacgaactcacagacatgacgcgctcacagacatgatacgctcacagacatgacacacccagatgtgacacactcacagacatgacacgctcacagacatacactcacagacatgacacgctcacacatgcgctcacagacatgacacgcccagacatgatgcactcagacatgacacgctcacagacatgcgctcacagacatgacatgcccagacgtgacactcagacgtgacgtgctcagacgtgaggcacagacatgacatgctcacagacatgataacgctcacagacatgcgctcacagacatgacatgcccagacgtgacacactcagacgtgatgcactcagacgtgacgcacagacatgacatgttcacagacatgacatgcccagatgtgacacactcacagacatgacacactcacagacatgacacgctcacagacatgacacgcccagacatgatgaactcacagacgtgacacacagacatgacgcactcagacatgacacgctcacagacatgatgcactcacagacaggacacgcccagatgttacgcactcacagacgtgatgcactcacagacaggacatgtgtggctccactcagcacccatacttagtcacctgtgcccaggagcacgcatgtctacacagatcacattcacagacactgtgacacaagtcacacagtcatgtgcacatgcgcacacacacactcggtcttctgcctcgactgcactgtgcaggacacacagagggacagaatggcagacagggcagtggattcccaggctggggaaggtgtgtctgctaccctcgcttgagaggtggggaggctccaggccagagacagagaggcctgtgggtggggcaggggtggagacccacacccccctccctctgtctctccctctctgtctctgtctctgcctccggccctgtgtgtgtgtctctgcatctctgtctctctccctgagtctcagtctccgcacgatgtccctggggctgcggacagcagcgctccgaatggtgtcagttgaggggtggcgagggagcgtccccggggaggtgggagccgcagtgccacgcaccccgcctaccaaacagctctgggggaggggagagggagggtggaggcgccaccgtgaggcgaggcggagggaggtctggctgctccccaacctcactcgtggaccccgcctcccctcagagacccagagagatggaggaactggaggttggggtggggggcacagagaaggggagacatgcagggaggaagagagaccgagggggtggagcgtgatacatggagaactgagaggaagcaggagtgagacacggagggagatggagggggataggcgggacatggggaaccccaccaggggaaggcacagagaaggaaagagacacagaggacaaggacaggtcccacagaaacaggaagcagactgggagccacatgcacacgcagagagaagagagagacagagacagagagacaggcagggggagatccgaggtggggaaacacggcagaaggagcgaaccagagaggctgagacaaaagtagattagaaagctggaggtcacgggagagcgagggccgcaccggagaccctgggttgggaggaaggagagaagagggcagagatgcggaaaattgagggattagggcagaggcaggagagggatgcaggcgagcccggccctggaggtggagtggaaggctcaggtgtaggccgggtggcgggcagacctaaggtgtggattcctcgtcctccgccccacctcgcccttcttcagtcctaggaggttggtgtcccctgggagtccgacccatcccagcttcaaagcccaccctacccctcctcctcctcatctccaccaggccccaccccacccagaccccagctccatcctctacctctcctcctggtcctcatccccaactcccaccccttccccacccttgccttcattctacctccacccccagcctcactccacatcgggccccacccctctatcagagtgacagaaggcagggaaatgactgttatttggtgatgctggaggggcgggggcagagagctgaagcggggtgtggtgtacaccagaaccagctactcagggagcccagagacccagagtccttctagacggcaaccaccaagggccagggctcaggcatcccgacagagcccggggcttggcaccaagagtgtactgaggaaattatgttgaggtggaatccagattaaactgtgctcagcagggaatcagggagacagagatagcagatcaaagggacagaaagcaggagatcaagggacagaaatgaggagggcaaagagacagggtcagagggctggggaaatagggatggagccgagagctagaggggcagatggatgggactgagatgcgggagcacacagggacagggaatcggatgacaaggaattgaggccaaaaatggggagaagtgggtgatccagggttagagaaaaggaggaacagagaaatggggtcaaagacccaggagggcaaacatgaggggcagagaactgggaaccggagagagactccgagggacgagggaccagaggcagtggggcaggcctgagggctagggcaaggggcggggcctgggtgggctgaggctggagctgggtgccgggccaccagggatcccacaagggccggggtccagccgggctgggggggactcagggctccaggggcatcaggcgcggtgctaattcagcgccatcgatcagatgggatgagagcaataaattattgtgacaagatgcaatcctggcccgcgcactgccgccgaggcggatcgatccctgtccccagccccacaccgggtcccatgcccaggcctgggctggaggggatgcctctgcccacctctccctccattctccaccctgcacacactcactcccactgacagccaggtgaagggaatgtgaggggcagcctagggaagaggcgggagggggctgggggaacccacagagggaagttcagcgccccctctgacccaggccttttgcttccctcagcaccccatcctcaccaccacctgtgaggtaggaactgccatgatggatgcccatttcacagatgtggaaactgaggttctgacaggaaaagtaacttggccaaagtcccacagggatgaggtgagcctggacttgaatgcaggtcagtatgactctaggcccccgatatttgtactgtcagaggacagagcaagggccagagacagaaaaggaggaaagagacaagacaaggagacagacacagagtccaggatatggagaaactgagagagagtcagagagctgtaaagaccctgtatggagaaaaacagacacagacaaagacaaccagagaaatacagagaacaaagagagactgggagacagacagacagagacaaaaagacagggtgagacagaggagtcgagaggccagaaaccaagagagacagagagactcagaattaagacaggcagacatggacagggacaaggagacaggggcaggtggtggcaaaggtggaaatggagaaaggaaatgaaagtgagggtgggtggaaaggaaaggccagcatgcagggaggggcggtgtgggaggcaggagtgtgtctggggaggcaggggtgtgctgggagggggctgtgctgggggggtgtctggggaggcggaggtgtgctgggacggggctgtgctgggggtgtgtctggggaggtgggggtggatctggggaggcgggggtgtgttgggagggagctgtgctgggggggtgtctggggaggcaggggtgtgctgggagggggctgtgctggggggtggtaggggtgcgctgggaggggctgtgctgggggtgtgtgtggggaggtaggggtatgctgggagggggctgtgctggggggaggtaggggtgcgctgggagggggctgtgctgggggtgtgtctggggaggtgggggtgctctgggagggggctgtgctggccccaaacagcttgtgggggaggtgggggtgagcatgtggaatgacagccttagccccaggagtcaatgaagggtgagaaagtgagcctggagagtaggggagatggggttgggaggtaatggagaagcaagtgtcaccaaagtccctaggtggataggtgtgtctgtggagggaggaggtcacctgaggggcagatgagggaggtaaggacacctggatggctaggagggcagtctctgaagtcagacagccttgacttgactcaaatctctaacatctacctgtttctgggacctcaaagaaactctctggactcagtttccttctctgtaaaatggggacaagaggcaagtacgtgcctcatgagggtcctgtgaggacaaatgagacaatgggtgtgaagaacttggtgtctgtcacagagatggatggtggtcttagtaatcgggagctgtcatcaccatcaccctcacctttatcctcattctcgttgtcgccatcagtatatatggggagggtaggtgttatgtggtggaacaggtggggcacacattacaagcacctgctactcagagaatgatacctggaccaggtgtttctgatgcacattgaagtcagataacctcggacttaagatgctgtgcagtgcggggagcaggtgtgggggtggctgggaacaggcgacacatgtgtctaacacatgctacaggtgttatgcacgtggaggaaggcgctcctcgaggagagagctggtcagagacacgtgctaggaaaggggaccggtgtttctggagagaagcaggttggagacaggtgtgagagatctgaaggtttcttcctaaaggtgtggtggtgacaagctgcagggacaggtatcaaaagtgaacatagcagagaatggggcagaggtgtgcagtgggttcccaatgcttgcaaaaggtgcaaagggactccggtcacatggatgtttggggggaggaaaaggagagaggtggctggagtgtggggaaccaggtgcatgtctgtgggacagggctgttttcaggaggtgacccctagacccagctgaagagatgtgaagcaaagagagattaagtgggggtatgcatagtgggtgtcgaagcctcggtatctgtttgctgattaaatgatttgaatgtgttaccagggcagaggattccctgggataaacaggtgaggaatggcaggtgcagggggttactggtgtgaccttgtgcagcaagagagagagagaaacatgggaaattaggtatgtgggaaagaagagaagtggatagagagtacctgagggacaggtgtgggaaaacaggtatacaggtgacgcagatacctgtggccaaggacagactcctgccccaaacgtgtgtgtgtaaagtaatgttgtgtatagtgagagacagtgagagaccaggagaggcaaagacagtgcaagaaggagtgagacacaggtgagcaagtgtacaagggaccgggaaactctgaggggacaagagcttggaggaaggcataatggcagggaaagccatgaggagggtactagtgtgtggattggtgatcaggtggtgcttggggttaggacacaggtggggaaggtgcttctgttgtctgtgatgagtaacccgaaatgacaagtaggaaagacaggtacgggggaatccttggaagtcagtgtaccttggaagtcaggtacaggtagagagggatgtgagcgacaggtgtgctcttaggtgacctgtgtgtggccagctcttctggaagggcaggtgttggggtggttaaggaggtgcaacactgtcacggaggaggatgggtgagggccaggaggctggggactggtgggggcaggccttacctgaggggacaggttagcaggttgcatgtgtgagtgcttgtgtgcaacagaaggaatgtgtgtgtgagtgtgtgcatgtgtggtgactcggtactgcttgagaggaggaagaggtgaagaaatacgaatgtgtgaggaacaggtgagtttgcagctttaggggacaggtgggatggctcacgtacaggtaggaaggggccagtgtgacatgaaatgagataaaatgcagggattccagtggaaggggcagattttagagaacaggtattacctggaggggcaggtaagaggggacgtatgctccccgagagaccagacatcttaagggcaggtgtgagggggacaagtgttacctggaggggcaggtgagaggaaataggtgttacctccagggcagatgaagggaacaggtatggaggacaggtgttgcgtgcaggcaggtatgaggagatagatgttacctggaagtccagatttggggagttgaagggggaacatggatgtgacaggtgcattgatagacaggtgtgaaaggttagttacctgaggccacaggtgggtgcagtgtgactctgccagatggtctgccacctcgatttctctcgctcccctgtcctcccctccctggggagccagttctggctctcgggtccctcccgtggctctggccctgggtggggcacagagttagctctgggctaggcgaggcctggcctgctggcctgccgggcagccagggcccctgaggctgcttggcgatgcggagcgcgtctgggccgcggcggccggccgggaggggggagcgggcgggggggccgtttagccgtgatagatccgcgcgccgcttgtctcttaatctccagagcgaccgatcgattcgctatttccctttgttgccagaaaattcgatcctgggcctggaattaggtccccggcttaatctgagcggaaaccagcgagggggagacagagacagagatgctgggagagacagagacagagagacagtaagagacagaaagaggcagagagagagagatagaaagagatgccgagaaaggaagagagagagatagatgccgagaaaggaagagacacagggagagataagcacagagatttagagagagatagtcttaagagttggacccaaaaaggaagagagagatgctgtgagagacagagatagagagacagatcctgggagagttagaggtggacacagagatgctgtgagagacagagacagagagacagtgaggagagacccagccaggggagagataacagaagtggcccagcagggccctgcgacagtggtggaatgatagaaagggtgtcccagagggccccggccccacgaaggtcagggccaggcctgtactccttgccccgaagtgtgcagaccccagaattggcccaaatgtccttcccacagaccctgtgacccctcataccaaatatccagaccccagatatccagatccaaattcgcagacccttagctttgaactccaactccaaatccagacttctggccccctcaagtccaaactcctatgctgatccccagtcccagatatccacacccccagtcctgactcccagccccagtcagctcccaacctcagatatctagatcttccgccccaagtgtccagtctcttggctttgagcccctaggtcccaaatatgcaagccctcagccctgacctctaaaccccactcagaatctagccccaaatatccagactcctcagccccaaacatccaaatccaccttcaggtcggccaccaacccccgttcccagattttcagtccagtctcttgcagaccccatctccgtggctctcactcgctctccctccccgcccccaaatctcgcacccctgtcccgaggccgcacctctagcgctacccgcctcccaccttcccagagttgggcgctgccccacctgccccttacagccggggcggatgaccccatccgcctacccctccaccggctcggaggcccagcttctcaggcctcccgggaccacccccgcgcccgccccctcctggggcgggaatccccgccccctccccgcccctgcgccggccgcggcgctcactcactttctgggcttttcgcatccgctccggtccggggagaagtgtttaaagttcggatcccgcagccatggcccccgcggcgtcctggggagggggcaccggggcgaggggcggggtggggggagatgcccggagccccggggaggcagagacccagaggacgaggagagggagtctctgagacgccgggacaggagagactcagagacggagagacagccaaggagacagagacggggagacgagcagagacggggagatgcagagagggagagagacagcgagatagacgcgcaaagagagcagagacggggagagctgaggacggagctccgggctggagctcagcacagcgagcgcgggcgggcgcgcgccggggacagcctggccggctgggggcgcggggcggccctgcctcctgcgccttctcctcttcctcctcttcctcctgctcctcctcctcctcgttctcctcctcctccctccactcctctgcgcgccgcgcgcctcccgccctcgcggccgcccggccgggctcggctcgcagatatatggaggcggcggcggcggcgcgggggagggggcgggggcgcgatcgatggaatataattttcctcaaactcggaaaataaagttcagagctgatcaaatttgaaaacagatgtcgaatcgcgactctaaataaggttcgatcccgggactgagggagtgggggtggggcgggggtgggtggagaggtggagagacccccctcctctccccttcccttctcctccgccccgctcctccctaagtggacgcgcggacaaacggacaggcgcgaggtggaggtggcgacgatgcgtccaggacccctgctggacacgcaagcctggaccgggactggaacacggacccgcacacacgcagcctggataggagatacacggacagagggacatatggatacagtaagacagtgcaaacacacactcagggacacacaaccctacagagagacagacacagacacacacacacagacctgccatctatacacgcagcacacacatgcggaccgtaatacaggaagtggaaacacaaccggtacacggagacattcaggcacacacagagaaacatatgcacaaacacagcctgcacaccacaccttccccaacccacagccactccctgatccactgacccacaaactggacacaaagacaaccagatgcacacacagccacactccactcccaacacacagcctggacacacaagccctcactaacacataggcagaacccagggctggcacactgacactccccttcacactcccacaaggtcacaggcacacacacgcacacctacagtgacaggaaagggccctgcccagccagatctgctcccattgaaataacaagtcaatatcgaccagcctcagggcgggtcagacccacagttcagctcccggccggccggacctcctggcccaacctgaccctcaccctcactgtctaccctcctattccctcccttgccccttgcccctcgccccttgcccctcaccctgccctctctcccgcttccactccccaacccaccacccccgacttttctctcccattcccaggtcaggctccgccccgccaagtcccacaccaccttctctggggaaaggcagctctcacctgggcagcccctggaggcttctacccctagaggggaaaataggtctcacggcaagacagcagtccccaggtggatattcaggggccaggacagctctgtcggatctcaccaaccccaccagcgcccaggtgctgagaccgaggtgctgagaggctagaagagaacttcagccctgcctgacagagaaggttcagcctcactcccgctcaccactcactcaggcaagtcgctaaacatccccgagcctcaagtttcctcatctgcaaaatgggacaataatgacctccctcctagagtggttgggaaggttaaaccgcagggcgcatggagcacagctggtactgcaccaagtaccaagtaaacacgcatttgctgtgagcttgctgcttccgaataatctcattaaaaatattaagaattttgccagataacaagaattccttcacttgtctgtaccttcacttgtctgaaagggaacattctttcaaggagccaacaggcttcactgggctccatttacgaccctttcccccagagccatggttctctgggtgtccataacagccccgggactgtccacagcctacttgaacacaggtcaccagctacagtgtttgtgcatatgtttctgtgcgtgtgcctgaatgtctccatgtacgggtcgtgtgttcccacttcctgtattacggtatgcacgtgtgtgctgcgtgtgtagatggcaggtctgtgtatgtgtatctgtgtctatctctgagtttatctgtaacacccagcacactacagagagcattccccctctacacccagcacactacagagccccctcttggctctgaaagccaaggaggaggttccggaacaccctctggaaggcaggactcctcccacacaggacaccctttgggagaaaggtgacaccctctgggtagatatgactccttggctacacccttcaagagagctgggacaccattaaggcttcaagtacaccaactggaatgcatttcatgaccattaaacccctgtgaagagggacagaacaccttctaagcagaaagagctcaattgactgtagataacacccttcagtaagataggacatcctctggagagatacagtttatcacaccatacacgacaccctactggaaaatagaacatctttggaatgtgagggacagacacccttaagatagcaaagaccatcagtcaatagggctttaagactttatctctaaaccacgcccctctgggagacaggaaaacgtccccaggtgtcagaaacacctggactgtaatgttaacacctttgagggtcttgcaatgcccaatcagagggtggggaggaccccccaaggagagctctgatgctcttggggctggggttgggggggccaggacccattgccttgtgcatcccacacaccggtaggaatgggaacagcacccgtctgactgtttagaacaccctcagcaccccccacccccagaagacaccgtcttgatttctggaacacctctgggggctgtgcattttggagtaatttatgctccctctctgagtcctagggttcgggaggatttgtgaaaaggagaccagagcgtgcagcgctgtgtaaggcacatagtaggtgctcagtgaaagagacccctcactgcacagcacgcccgcggccggcaggggcacacgttccctcgttagcagtgttgccaactctgcctacttggctgaaggaagcgtctcacaggagggggatcgttaagctgtacttaacatccccagggaggctgcagcagcagaagactgtagttaataccccactgagagaggacgccctcagggtgtttaatgccccctaggagagagggagacagagagagggagcaggagaataccctcaccagcctctaacacccagtggactgaatttattacccgtgaaggagagagcatacctctggggtctgtaatatcctctagactcttgaaacccccaagagcaagaggacccctccgtgagggctatcggctctctcgagattgcttttaacaaagatgcctcctggtgcagctgaaaccactaaaggtgacagagggtgaaaccaggagccccccaccccaagattccatctccttaactctctccccaccactgcagccctcctggaaccacaggaacaaaagggaaggtgggggtggtgtgggtaggggaggttgaatggggcccaaatcccagcatgtcaatagtcatgacaaggaccatttaatgggatgtgcctggcagtggcctaaactctatacacagattaactcaagcaagtctcacggcacaactctaagaggtagatgctgttataagcgtcacccccacttttactgatgaggaaactgaggcacagaatcacttgccggctgtcacacagctagttagtattggaaggggacctggagccaagcagcctggccgaggggtctgtgttcttaaccaccaggccaccctgccctccccgctgcccccatattagactaggagcttgcgcagacaagcgccctgcctgcacggctctgcgtcctcccagagcagggcccaccctaccactgtgtcctctggctcagtatgaccgcccaccatccccgatccctcggggcttgaggctccctgtgggcagggcctgtgcctgattcatctctgggtccctgctgagggcaaagcctagcccacagggcctggggaggaggcagggagggagggagaggggaggagggaggcagggagaggacgttaaagagagcagggagggaggtgaggagaaagcaggcagagaggggctggggagaaggacggggagtccccggggagccgggcctggagctgggccaagccacactgctgtggatgttggggagagcagagggaatgggggagtccagtcagctgggagaggggtgcaaacaaacagcatggccacccctccctcaccccacccctatcccgggtgggagaagatggaccgagatgggcctggaaggtgaaggatgaaggcccgggacgaacaagatgcaaggagggcagacagacacaggacagatgggagccaggagagcacggggaggcagccagccagggtgtgtgcctgggggcgggaattcagacagacagacaagggtgagggaaaggatgggcgagggtgttggaagactggagacagatgtgggggctggtccaggaaaaggacagacaaacttagggcttggggctggggcaggagggacagacagacagaaggggagagtggccaggaaggaggggaggatggacacagggcgtctgcagaattggtgggcagatggacggagggacgggccgtgcagtgcagccggcggggccagggccaggccgagggcgcgaggtggcagccggcccggggaggcggaggctgagcgagcggtggtgtttgtggagctgtcggctgcggtggaattatgaaaaatagcaggcatcggagccggccttcagcttcgattaggggagatgggacatgacaggtgcgatcaatacgcagccgttctataaagtgtcaagtaatgaatcaatttcgactaaattttccatttttcagaggccgttctccgagagaagaatatcctcttttgtaaagatattattatcgatttcggcggcaatttgacatcaggggtagttaattccactcagaataaaattgaaaacacttgagagagaaaagagagaggcgaagagtgagacagagagggaaagagggggagggagggaggggctgggagagagagatggatggacagagagacagagacagggagacaggaacagacagtgagagagacgagagagagaagagagatgcagagatgcagagacatgaagagaaacttggagactgcaaagcctagagttatagagagacacagggacattcagagagactcagagagcagagacaccctaagaaagggcgacagagagacaaattgagagtggctcagagagaaaatcccagatgttactaactggctacagagaagcaaagaaatggacaaagacaattcagagaaaaagacagatggaggactgggcagcagaaactgatgacacagacagacagacagacacacagaagtgagaggctgagaaacaggaacttagggaactggggagaggggctgaagggtgtgcggagcatgagcaacagagaaaagcgagcctggcagaggagaggccagagaggcagagtggaggggtggggggcagagggtaggagaggggccaagaggctgagaacctgccaggaagtggggaggaaggggcaagggtgccaggagaagggcagaggctgagggtttggggctgagggccaatctggagatgagagtttggggagatcctcctgtcctatctacgctgtccccaaagtcagttgccctgaatgggcagaagctcagcgtgtgtgtgtgtgtgtgtgtgtgtgtgtgtgtccctgagatctggtgtgcatgtgtgttggctggtgtctgtgtgtccttgcatgttgactgaatcccatatcccattagacgtttgtgtttcctggacacacacacaatctgtttgtgtccctgtccgtgtgcctgcacatgctgtgggtccctggtctcccagtcccttgggtctcagctgcaggcaatggtgacaacatttctggttagtgcctgtcagtccccagctgaaatctccatttatccctgagcaggtcacaggctgcctgggaggaagagagaggaggcgggtagaggataggacccctgggttctgagagagatgacccaggacctgtactcctgggtctgagggaggatggtctcagatcctgggctcctgggtctgagggaggaggggctggggattggacccactgggtctgagggaggaggagctgggagcctgactcctgggtctgagacaggagggcctgggggcctggactcctgggtctgagggaggagggcctggggacctggactcctgggtctgaggaaggaggctgctgggggccgggactcctgggtgtgagggaggaggggctgggggcctagactcctgggtctgagggaggagggactgggggcctggactgctgggtctgagagaggaggggctgggagcctggattcctgggtctgagggaggagggagtggggctgggacaccccatggacaggatagtcagcagacaagtaagtaacagggctggctgggaagcccccgagccatcaccagcctcccctccagaaaagcctgtgcctgctgccccctagtggacatggagattaggccagaccagggacagggaactgacaggtcaaggagggaagccagaggcgctgacccaagtgggagcagagacaggggagagggagagagagaggagggaagagagaaggaggagatgggtggacagacaggcggacacagacagggacaaagatgaatagagaagtgggctggggtcaggccgacaggattgaggactcgaccttggtggagaagaaagagagaccggggagtgagttcagggctagaactggagatggacagggaaagatggaggacacagggggtctgcagcagacggcaggcagagggtgagggtgacagagagactcttggacagacagaggctgggctggtgagacctgggtacagacagtacaagagacaggacaggagccatatggacagatggacagtgacagagggatgggagctaggtctaaaggagggagaaaacccagagaacaggcagcgaagaggacaggtggacagggacaagggcaggcactcatggagagacagacggacatcggagggaaccgcagacacacccagaagaaagaggtggacagagagagagaaagagagacaggtggtcacacacagagagacagacggatgcggagaaatcagggctccccaagccaagtggacacccggagatgaagcagagagcggtatgtggggggagcccggagcccggcggggattccaggctgaggggctccctgtggcaaagcctaggagagttgctggggaacagtctcccctggccggggtctctgcccgccaccccctcccaggctccccccccacccggcgggctgcccggcggaggcgacagattgagcgatgagacgcattacgcacttaatccgcctgattgaatgttttgctttcgcccaaattgaaacattaaacaacacgggacgagaagaggcggccgcaaatcactcatgaaagattcatcttctcccaggcagccgccaccgcccgcctccaaggctgcccgccccagccgggaagcctcagggtgggggtgggggtggggcagcacccctgctcactctggggagccccagccctagtggtctggggaagttcttcccactgtctcgcctcaatcctacaggtggtctcagagactagaaccctggatccctcggccttccctggacagcatgaccttagccctgtccctgtccctctctggctggggaatccttgccctctctggggtccatctctccagttaccttcctggaccagcctggacctttgggacatggaaggggctgctcagagttgggggatgaggtctgggagcctcctccccgtgcagtggggctttctgggttcttgatccaagagtgggggtggtgtctgggggctgagtcagagggaggtggccgctgtgtcaggatcagtgcaaatgggcagacagggagtgtgttccctgccacttgggagctcagtgtgtctctgtgtctgcctgcatatatgactgtgtatcttctgtctcgctctgcccatgttggtgtaacttgctttgcgattgtccctgtgtcactacactcaggtctcggtgaccctgcgtgtgacggtaactctgtgggcttgtgggtatgtctgtctgcctgtctggcactttctgtatgtgcgtcctgtgggcagcatttttgtgtggtgtgtgtctgtatcagtgtgacttttggggtgtggctgtgtgtgactccctgtgtgtaagtctgtggatgactgtgtgccgtgtctgtctgtctgtctgtgtgttgcctgctctgggtctgtctgcaggtctgtgttgaactatttctgtgtctgggtctcttttctgcatccgcatgtccctgtgtctctttcagcctctgtctctgtctctgcctgagggggcacctgctggggccactagaggaaggcctgggtgcggagaagctggggagagaggaggcaagaaagacggagagacaggacagcggtgacgcctgagaaccagggagcagggagcaagcgcgagggagctgggggggccgttgtgggcgccacggccggagtgggtgatcaatattcgatttaggttttaattccggggcttttggagcctgtcagccctgatgtatgagctcacactggggccgcccagccagccaccccaccagtgcccatggcctggtggcctgtcctgggctccctggccctgccggcggtggactataggagaggggggaaggggagaggggcccagtgaacttgagcttggtcccttgcccacccagtgcacctatggcccctgctcctgcctggcctgccaagcaaggggcccctagaggtcctcaaacacctggtcgggtcccacagcctgcctgtctgcatggacctcatgttcagacacacacatagctctgggctcatatatgcctgtgcccatgcaaactctaacacatacaccccgggttcaaacacacatgtgcacacacaagccaccatgcatctcctctgacatacatgtgtgtccacatacaaactctgacacacatacgtggtccacacacataaccccaacgcatagacacataaaagcaccacatgaaccggaggtgggaaccctggggacacagcattctggcaagagaggcaagagacggagacacagaaactcagacgggctaacagtgagagatgagagagacggaccagtgaagagctcagagaagagcttgagagtggggacagacgcggagagcccccgaggggaggttggaggccacagggcagagcagtggacagggctcagcagtgagggggatgggagcccccccaaaccctgtctctttctcaggaagatggatccaccgccctccctgatgacaatgctgtctgcgcaaactttaattaacactttgagttaattagttcgagatcatttaggagtaaaatgtttttattagggaggctgcgagcctgttgatggatggggcgcgattcgctcttccgcctgcggggacagccggtaaacagaaatcaatcaggggcctcccaacccagcccccccagagccaagctcccagcctagagcccaggagtggaggctcccagcctcctccttcccccaggccccagatttcaggccccagcccctcctccctcagacccaggagtctaaaaccccagcttcctcttcccccaagacctacgagtccaggctcccagcccctcctccattaggctcacgaatccaagcccccagcagtctcttccctcagacccaggagtccaggcacccctgcagcctcctccctcagacccaggagtccaggcccccagcagcctcctccctcagtctcatgagcccaggccccagcctctcctccctcagacccaggagtccatgcccccagcctctcctccctcagacccaggagtccaggcccccagcccctcctccctcagacccaggagtccaggcccccagcccctcctccctcagacccaggagtccaggcccccagcccctcctccctcagacccaggagtccaggccccccagcccttccttcctcagacccaggagtccaggccccccagaccttcctctcccagacccaggagtccaggcccccagcagcctcctccctcagacccaggagtccaggcccccagcagcctcctccctcagtctcatgagtccaggccccagcctctcctccctcagacccaggagtccaggcccccagcagcctcctccctcagtctcatgagtccaggccccagcctctcctccctcagacccaggagtccaggccccaagccctcctccctcagacccaggagtccaggcccccagcccctcctccctcagacccaggagtccaggccccagcctctcctccctcagacccaggagtccaggcccccagcccctcctccctcagacccaggagtccaggccccccgcgtctcctccctcagacccaggagtccaggcccccagcccctcctccctcagacccaggagtccaggcccccagcccctcctccctcagacccaggagtccaggcccccagcccctcctccctcagacccaggagtccaggcccccagcccttccttcctcagacccaggagtccaggccccccagaccttcctctcccagacccaggagtccaggcacccctgcagcctcctccctcagacccaggagtccaggcccccagcagcctcctccctcagacccaggagtccaggcccccagcagcctcctccctcagtctcatgagtccaggccccagcctctcctccctcagactcaggagtccaggcccccagtagcctcctccctcagtctcatgagtccaggccccagcctctcctccctcagacccaggagtccaggccccaagccctcctccctcagacccaggagtccaggcccccagcccctcctccctcagacccactagtccaggccccagcctctcctccctcagacccaggagtccaggcccccagcccctcctccctcagacccaggagtccaggcccccagcccctcctccctcagacccaggagtccaggcccccagcccctcctccctcagacccgagtccaggcccccagcccctcctccctcagacccaggagtccaggcccccaggccctccttcctcagacccaggagtccaggcccccagcccctcctccctcagacccaggagtccaggccaccccagtttcctccttcagacccatgagtccaggtccctgcctctcctggtcccagcttggtcgggagtccacttctgtcgcaggacccggcttccgggcccccacctctaacctccctcggatgcctgaaaaccctgcctggtcctccgggcagccgcccccctctcccacccgcgccggcctcttggacacagcactagggtcggattcacagttgggagctccctcggctgcgggtcagaccctcccctccactccctctcgaggaccctgactccgcggccccggaactgtcttctcgccgcccctcggcgtctctgcgcgcctgtctcatcgggtctcggccgagagacgtctcgggcgtccccttcccccgcggtgacggcttcatcaggtgtccgcgcgggcgggggcagggcgaggcctggcgggcgcggggagcccgggggcggaggggcgggggttccggggccgataaatcttcatcaggcggcggcgggggggccattaggcgctaatgggaagatggaggggcctgtcggccgcgcgggccgggcctcatttgtcctgcttcccgctccattggccgctgcccccgccccgcccctcccccgccgccgcgcgccccatttccgcttcaaacctttggaggggacgtgggggggatcccgggggctgctgaaaaagaggcgactggaaggcagggacagattcaggaaaggggagggggctcagggcatggaggggaagggggttcggtcgcagagccagtttagaacgtgggtggctcagctagaacgcaggcggagtgggcaggagaacgtggcggggagggcttggaacgcggagaacgtgaatagaagtccccgaaggaaaagagaaagcgggagggggccgtcggggacgcgagaggggacttggaagatgggagtggcggggactggaacaaggcgggagtgggtgcaggattggaattaggggagggggtcggatcgccggccccagcctccaagggcggggatccgggaaggcgagggggcggcgtcccccgaggcagaaagcgcggaccccgcctgtcgccgccgccgccgcccgctcccggactcgcgccccccgcgcgtccactctgatttctcggcccatttttcttcctctcctgtcactccggcgctcgccctcccgccgccggctgccccgccgcgctccgcttcccgcgggaacccccgctgcagccagccccgggggctcagccggctccgcgcagcagcgcccccacccccaccacgcctggccccgatcagtccccaccaggaccacctatttccccaagtcggtcacccacaaatggactgcctccccgaacacccccaggagaggccccgccttggggggtagcactggggttggctcccccagcccctgggactagatccctaggacctcaggaccctagactgagattcccccaaaggaggcatctagatacccacaaaccaggccttcgaacccctaccctccctctgaagccctcacatggactgaagacccctgggatcagacctagacatgggcctggatcaccccaggcggagcgaatggctaccccgactcacaaacagaaggtgataacccagcctagctccagacagcccaaaatgaggattctggggcccagctccattcacccccaaacaagtcctccagcccaagacactcagagaataagggaaatggaccttagctcagtcaccccaaaataagcatcagtaaccacaagccccccccaaactaggcatgtattccccatactgtcacccccaaattagacgttggggccccaaatttggcacacctaaactagactttcctcattaaacctcatcaggaccccaagatacaccacccacgatctacaaaagtaggccccagctgctatcacccactcagcatgtgaccccattctcaacacatacaaactagaaaatgggactgaaattcaaacacccttaaactgggcaaccccaaatgtgacaactggatcctcagactcaagtcaaaatgaggatctgggcctcacccaccctaaggctcccccaaactagacatctggctctccagactcagtttccactaaaccaaggaacctccgaaatgccccagcaagtcaccttaacactagtcatgtaggtctctacgtagcatcacccctaaaccttgcatccagacccaatcattggtcaccctaacctatgcatgtggacaaccaacttttttttttttttttttgagacggagtctccctgtcgcccaggctggagtgcagtggtgcgatctcagctcactgcaagctccacctcctgggttcacgccattgtcctgcctcagcctcctgagcagctgggactacaggtgcccaccaccacgcctggctatttatttatttatatatttatttttgagacagagtcttgctctgtcacccaggctggagtgcagtggtgtgatctcggctcactgcaagctccgcctcccgggttcatgccattctcctgcctcagcctcccgaatagctgggactacaggcgcccaccaccacacctggctaatttttttgtatttttagtagagacggggtttcaccgtgttagccaggatggtctccatctcctgacctcgtgatccacccgcctcggcctcccaaagtgctgggattacaggcatgagccaccgcacctggcctttttttttttttttttttttttttaaagacagggtcttgctctcttgcccaggctggagctggagtggcatgatctcggcttactatagcctcgacctcccaggctcaagtgatcctcctgcctcagcctcccaagtaactgggacaacaggtatgagccaccactcctggtcgaccagcagctttagaagccccccaacttggcacctggaattccagcatcacctgcccttacaatacacatctgagctttcacccccactcataagagttagagacccctctaagttaccccacgaactcagcatctagcctcccaacctcagacacccccaaagttaggaggactctgtggcactgaagctcagatctccaaactaccccttttgtccccaaacttcagtcaccctacactaagcaccccataggctgttacccccagaagtaggcaagtcaagaacccccaaatcaggtatgtgcagctgaccctcaaggtcagtcttcctaatccaaacaccaagaagctcataatcagagagacctgaacttgggatttagagtacctgcctcaaacaccctcatagcaggttggatggtggccccccaaaaaggtatgtccacatcctaaccccagaacctgctaatgtgaccttacaggaagagtctattcagatgcaattaaatgaaggatcttgagatgggattatcctgagttgctggggtgggccctcaatccatgttaagggacctggtaacagacaagaagaggccggacgcggtggtttacacctgtaatcccagcactttgggaggccgaggcaggaggatcccttgagcccaggagttggaggccagcctgagtagcataccgagacctcacctctacaaaaataaaattagctaggcatggtggtgcacggcttagtcccagctactcgggaggctgaagcgggaggatcgcttgagtttgggagatcaaggctgcagtgagctgtgatgataccactgcactccagtctgggtgacagtgagacctcttcacaaaaaaaaaaaaaggtgggggggccgggcacagtggctcacacctgtaatcccagcactttgggaggccgaggcatgcggatcacaaggtcaggagatcgagaccatcctggttaacagggtgaaaccctgtctctactaaaaatacaagaaaaaaaaaattagccgggcgtggtggcaggcgcctgtagtcccagctacttggaaggttgaggcaggagaatggtgtgaacccgggaggcggagcttgctgtgagctgagatcgcgccactgcactccagcctgggcgacagagcaagcaagactgtctaaaaaaaaaaaatccgattgaagccactcctaattcaggcattgagcctcccagaggatctgagtctctgtgtcagtcacccctaactaggtatctgggtgattagcctcagacattcccacactaaggaacaacaccccgggccgggcacggtggctcacgcctgtaatcccggcactttgggaggccaggtgggcggatcacctgaggtcaggagttcaagaccagcctggccaacatggtgaaaccctgtctctactaaaaatacaaaaattagttgggcattatggtgggcgcctgtaatcccagctactcaggaggctgaggcatgagaatggtttgaaccaggaggcggaggttgcagtgagccgagatcacaccactgcactccaccctgggtgacagagcaagactctgtctcaaaaaaaaaaaaaaaaaaggaacaacaccccaaactccatcaccccaaactaggtacaaataaccacaaaccctggcaactaggtcttgagactcagtgagccccaaattgtatataaatgttaggaactcataactagtagccctcaaaccagacatctggttgccttctcttaatctcccaaagatgggcttctcatacacgagagtgacacccccaggaggcatctgatgacacaaccccagcttggcactggatctgctgagggacatctgggccccagctgtcaccccagattgatgttcgggctctcagatggtcatcccaacctcaacatctgggcagctgggattacacactcctaaactagacatctgaatgttttgccacaactacccacaatctaaggcattttggatttgagccccaaacttgggctctgaaccacgcccccagcctcagaactccctaactgaacatcatggtaagtcacttctattttggatttagggtcccagccttaatttgttcccagattagaatataggcccacaggctgggcgcagtggctcacgcctgtaatcctagcactttgggaggccaaggcaggtggaatgcccaagctcaagagtttgagaccagcctgggcaacacagtgaaaccctgtctctactaaaatacaaaaaaattagctgggcatagcagcgtgcgcctgtagtcccagctacttgggaggctgaggcaggagaattgtttgaacccaagtcccagctacttgggaggcagaggttgcagtgagccaagatcacgccactgcactccagcctgggtgacagagcgagactccatttccacaaaaaaaaaagaatacaggcccacagtttcactcacccctaaattaaccttcagggcctcaaggtcagcaaaaccacagcaagtcactctcaaaataggcatctgagctccacagccacccacccacacactttgcatatagcctcccagtctcagatgtccccaaaactagggcctggggcacccaggctcagtgacccccagactaagcaagtgagctccaaacttcagtcagccctaaggtaatcagtaggacccccaaatcaacatgtgggctgccaacctcggtcaccgctaaacctcaaaaccagtcaccctagacttgacacctgagtctccgaactgactcaccccaaacatgacaggtgaaatgccacaggaagtcacttctaatctagacagtaggcccccactgtcgtcactaatgtgggtgtcagtagcccccatccccggcctcagtgacgaagccacacaactgcagacatctagagctgggtgttgggtgtcccaaaacaggaacaagggctcacacgtgcccagaactgggcaggaggaactccaggcaccccaaattcaggatcttgagccccagcatccatcttctcaaagtgagaatctgagtcctcagtgttagtcacccataaacaatgcatcttgactaccacaaccaaccatttgcccccaaactagggttttttttttttgagatagggtcttgctctgtcacccaggctggagtgcaatcatggtgcaatcatggctcgctgcagcctcaaactcctgggctcaagaggtcctccctcagcctcctgaatagctgggactgcaggcagttgccactgtgcccagctaatttttttgttttttgttgtagagatggggtctcactatgttgcccaggctactcttgaactcctgccctcaagggatcctcccaccttggcgggactagctgggactacagcccagctagtttatttttatttattttattttattttttttggagatggagtctcgctctgttgcccagagcaagtggcgcaatgttggttcactgcaacctccacctcccaggttcaagcgaatctcctgcctcagcctcccaagtagctgggattataggcgcacaccacaccccagctaatttttgtatctttagtagagatggggtttcaccatgttggccaggctggtcttaaactcttgacctcaggcgatctacctgcctcagcctcccaaagtgctgggattacaagcgtgagccactgcacccggtccagactaggctttagacccacaggatcctcttgtgtccagtaaagggcagctgggtctccagggccagaaatcccaaggttacctgtgccccagccacagcgacccctaggccaggcattagagcctcagtctccatcttcccccaggggtctctatcactgccacccacaggtgtggaggtgctttgaaaacactggccctccatgtcatagacatgaagcactcctcaagtgggtcctgagtcctggggccctgacctcttgacacctccattccaaatacccagactcctagcttcagtgaccttcacacaaagctccacaccgctggccacactcactcagagaccccacacctgagtacaggaaacccttgactcagttgtcccaggaacattcaggcatcagcactctcaggctcagccatgtttagaagggaccagcaccctagactctgcgccccagactagaggactgaaatgacagctcctgccgccccaagtcaaaacaggcacccctcagcctcatccctccagctgcacaactatgccccaagtctctgtcccccaaactaggaagtctctgccacccagaactgggaaactgtatctccatctctgttaccccaaggccgggccttgacttctggtctcatcaccccaaactagaccactgatcccagtctctgcctcccccaaatggacaactgaaccccaatcactgtcagctcaaactggacaaaaggaccccagtcactgtcaccccaaactagaaagcaagaccagtagtctctgtcaccccaaacatgacatggatgagtaatgtctggcacatcaagatagacaacaagacctaaactgtcaccagaaattggcaagtggatgagcccaggagttcgagatcagcctaggcaacatagtgggaccctgtctctatcaaaacaacacaaaacaaaataaattagctgggcatggtggcacgtcccaggaggcctaggtgggacttgagcccggggaggtcaaggccacagtgagccatgattgcgctacctcactcctgcttgggcaacagagtaagaccctgtctcaaaaataaaatgaaataaaataggccgggtgtggtggcttaagcctgtaatctcagcactttgggaggccgaggggggcaggtcacttgaggtcagaagttttagaccagccagatcaacatggtgaaacctcatctctgctaaaagtacaaaattagccgggcgttgtggcaggtgcctgtaattccagctacttgagaagctgaggcaggagaatcgcttgaacccaggaggtggaggttgcagtgacccaggatcgcaccactgcactccagcctgggcgatagaatgagactctgtctaaaaaaataaaataaggccaggcacggtggctcacacctgtaatcccagcactttgggaggccaaggcaggcggatcatgaggtcagaagattgactccatcctggccaacatggtgaaaccccatctctactaaaaatacaaaaaattagccaggcatggtggcgcatgcctgtagtcccagctactcaggaagctgaggcaggagaattgcttgaacccaggaggcagaggttgcagtgagccgagatcgtgccactgcactccagcctggtgacagaacgagactccatctcaaaaaaataaataaataaaaattaaattaaattaaattagcaagctagtctgtcacctcacaaatgtactgggacaatgatctctgtataacaacctacacaaccagaccccatttctgttacccaaaatacatgcaggggccccagtccgtttcccaaaagcagacaaccagatacccagtctctgtcacccatatatactctgggacccatctctgtcctgtaaaactagacaacctagccctagtttctttgccccaaatactgcttggcacccccagtttctgtcactcaacactagacaaccagaccccagtctctgtcaccccaaatatacccagggatcctaacctctgtcccacaaaactaggcaactggacctccagagtctatgaggtcacatgttccctggtctctgttttctccccacaaaactataaaaccaaatgctccatctctgttaccctgaatacatcaccctgggacccagtctctgtctcacagccctagacaaccaacccccagacactgccaccccaaacgggacaattgtacttctaggcttctagggtctgtcacaccacgttgagcaacacgttgcataaaatgtgacctcagactagagacctgggcccacagtcccattcatcttcatctgctcgaccagactccatccagtgtgtctcctaaactagacggccagacccctggtcccactcatgccaaatgagacaagctaacttccattctatgtcaccctaaactagaccctggaacccctatcatttcatctcaccctggacaactgatccctaatatctgtcattacaaactaggcagctaacctcctagcccctgtcaccccaaattcaacttcccagtctctgtgccccaggctaggtcctgggatcccagtctttatcccacaaaattagaaaccagaaccccctgattctgccaccccaatctaggcaaagaaacccccacttctgtttcttttttttttttttttttcaagacaagagtctcattctttcacccaggctggagtgcagtggtgcgatcataactcactgcagcctggacctcctgtgctcatgtaatcctcccacctcagtttccccaagtagccgggactacaggcacgcgccaccaggcctggttgatttatttttattttttattgagacagggtcttgctgtttcccaggctaacccccacttctgttgtcccaaactggacatctggaaccccgatctccagcatcccatactatccaaccagatcccagtctgttaccccaactaggcaaccagacctataatggctgcagcctcaaactagccaactggtcaccccaggtcttccaccccaagccaaggccctgatccccccaactggtcaccccaggtcttccaccccaagccaaggcgctgatccccccaactggtcaccccaggtcttccaccccaagccaaggccctgacccccagggctttggtctttagccaaaattagttggccagtcttgtggcctctgtaaccccacccagataattggactggtagcctctggcaccaaagtgagataaccagacctccagtatcagataccacagtggagttcaccagatccccagttactgttgctctaaactggtcatcaaaccctcagtctggtaccccaaaccttaaatttcagtctcaacccagtgtcacctcaaaagagccaagactctacatccaatacccctaaggaggtgccagaagtcccagtcttcgccacgagaaactagacaatcagaacccagtctatcaccccaaaacagaccttagaatctcagcccccatcaccccaacctagacaagaacattagtctctgccacctccaacaactggttcctgtcacaccaaccagatgcaagtccctaatctgtcacttaaagagaactgggctgggcgtggtggctcacacctgtaatcccagcactttgggaggccgaggcgggcagatcatgaggtcaggagatcgagaccatcctggctaacacggtgaaaccccgtctctactaaaaataaaaaaaattagccgggcgtggtggtgggcgcctgtagtcccagctactcggggggctgaggcaggagaacagcatgaaaccaggaggtggaggttgcagtgagcggagatcgcgctactgcactccagcctgggcgacagagtgagactctgtttcaaaaaaaaaaaaaaaaaaattgagaactgaacccattttcttttttaaagacagggtctcccaggctggagcgcagcgtatgatcctagctcactgcagcatcaaactcttggattcaagtgatcctcctgtctcagcctcccaagcagctggaaccacaggcatgcaccaccatacccagctaattttttcttttttctttttttttttgtagagacgggacctcattttttgacccaagctgctttcaaactcctggcctcccaaacagatctccaattaccattaccccaaatcagaaactggatcccaggctatatcaccaaacaagaccaccagattcccaatctgtcacttccaaccagccagctggatcccagactgtcaccaaaatagacaagacctttggtctctgtccccttgatgagacagcaagccctccaatttctcctaccccaaaccaaacctcgaatctcaaggttgttcaggagagacagagaaatggtactgtagttttgtttttatttttatttatttatttattttttctcgagacagagtcttgctctttcgcccaggctggagtgcaatggcgcgaactcggatcactgcaacctccacctcctgggttcaagccattctcctgcctcagcctcccaagtagctgggattacaagcgtgcaccaccacacctggataatattttttttttttttttttaagtagagatgggtttcaccatgttggccaggctggtctcaaactcctaacctcgtgatccgcctgcctcaacctcccaacttgctgggattacaggcatgagccaccgcatctggcaggttttcatatttttgatggagtcttactatgttgcccaggctgatcttgaactcctgggctcaagcgtcttggccttccaaagtgctggaattacaggcatgaaccaccacctccggccctgggaccctagtcttgatcaccccagatggaagcttctggtctcagcatctcaataactcaacaccagaatttgagacctgtagccagttgccttcagaataggcctttggcctgagtaccaacctccccctgacccgcagctctagcctgctgcctcagtgatctcagaactgagtgcttgggtctttggcatcagtagcctccaagcaaagcacctcgatcatattcactgcaaacccagcgatgtagactggacctagcgtccactcaccaacatgggcacggacactcagtctcccctggggaatactggcattgaggtcaacaaacaccctctgctactccaaaattgggattggaaccctggcctctgagtaggcccaggtgacctgacttggccgggggcaccccgggtccccaccctgcctggtgccccaggatgagtccatctctaactgcctccctggcggaagcacttgtctgccctctggtggcagattctggaagtgcactcctgtgtggcgtcaagacacccaggctccccctggtcttcccatcttttgggaagcctgaagcctgggggtcttcctgcttccttccactcacctcccacgcaagtcagccaccaagacctgtccttcaacctcctgaatctctcttccctgtctcgcctctccaccccacttccctgccccatcttccccagctaggatcatcgtccctcgtctcactccctccagcccatccgccacacaacctcagagggataaccctctctgccccgccccgcccctcccctgtccccgttcccctcccctccccttcccctcccctccccttcccctctcctcccctcttttccttttatttttcccttcccttttccccttcctctcctttcctttcctctttcttttttttttttttagagggagcctccctctgttgcccagattgcagtgcagtggcgcgaccttggatcactgcaacctccgccccccaggttcaagcgattctcctgcctcagcctcccgagtagctgggattacaggtatgcaccaccatgctgggctaatttttgtatttttagtagagacagggtttcgccatgttgactaggctgatctcgaactcctgacctcaggtgatccactcacctcagcctcccaaagtgctaggattacaggcatgagccatcatgcccgggctaacttgcaattttctatttaatccgcacaccccccgcccccgccttctttttgagacagggtctcactctgtcacccaggctggagtgcagcggtgatgcaatctcggcccactgcagccttgacctactgggctcaagcaatcctcccacctctgcctcccaagtagctgggaccacaggcatgcgccaccacacctggctaatttttgtattttttgtagagacagggtgttgccatgttgcccaggctggtctcgaagttctgagctcatgcagtccacccaccttggcttcccaaagtgctgggattataggcatgagccaccacacccagcaactcttgtttgtttgtttttaaagagatggggtatctctgtgttgcccaggctgagtgcagtggcagtcatggctcactgtagcattgaactcctggactcaagttatcctcccacctcagcctcccaagtagctgggactacaggcccacactaccatgcccaaataactgtttaacttttttgcagagatgggggtcttgttgtgttatccaggctggtctcaaactcttgggctcatgcaatcctcccaccttggtttcccaaggtgttaggattatacaggcatgagccatggtgcccagccttaatcatgttttttttctttttttttttttttgagatcgagtctcgctctgtcacccaggctggagtgcagtggcgcgatattggctcactgcaagctccgcctcccaggttcacgccatcctcccgctgagtagctgggactacaggcgcctgccaccacgcctggctaatttttttgtatttttagtagagacggggtttcaccatgttagccagggtggtctcgatctcctgacctcgtgatccgcccacctcagcctcccaaagcgctgggattacaggcgtgagccactgcgcccggcctcttaatcgtgtttttaaaagtaaaaaacaaaaggtgaaatgaataataatttaatccactatatcaataaattatccttccaacacacataatcaacataaaaattattattatttttgagacagagtctttctctgttacccaggctggagtgcagtggcacaatcttggctcactgcaacctctgtgtcccaggttcaaacaattctcctgccttaacctcccaagtagctgggattataggcatgtgccaccatgccaatttttttttttttttttttgagatggagtcctgctctgttgcctaggctggggtgcagtggtgcgatcttggctcactgcaacctccgccccctgggttcaagcaattctctgcctcagcctcccaagtagctgggattacagtgcaccgccaccatgcccggccaatttttttgtatttttagtagagacggggtctcaccatcttggccaggctggtcttgaactcctgacctcgtgatccacctgcctcggcctcccaaagtgctgggattacaggcgtaagccaccgcgccaggccaatttttgtacttttagtagacacagggtttcaccatattggccaggctggtctaaaactcctggcctcaagtgatctgcctgcctcagcctcccaatagtgctgggattacaggtgtgagccaccatgcccagcctataaaaattattgagatattttactccattttcatactaaatcttcgaagtctggtgtgcatttcacactcatagcatgtctcagtttggaccagccatgtttgaggcagccgcatatggctggccaccatatctgacaggagaattccagaacagtgggcatcagtgggctctgggtgagcacctgctgcatcaaggatgagtgggtgagttctgctgaggagacacgaggttggagaggctgcatccctgaggccttggcactcgctgtccctctccttgggaaactccacccacttcttgtgtctcctcagagagccctcccagaccacccctatctaaagtaattggcggggcacggtggctcacacatgtaatcctagcactttgggaggccaagacaggtggatcacctgaggtcaggagttcgagaccagcctgggcaacacagtgaaaccctgtctctaccaaaaatacaaaaaaatcagccgggcgtggtggcaggcgcctgtaatcccagctactcgggaggctgaggcaggagaatcacttgaaaccgggaggtggaggttgcagtgagtcgagatcgcgccattgcactccagcatgggcaacaagagcgaaactccatctcaaaaaaattaaaaaataaaactaaaaatacaaaaattagtcaggcgtgttggtgggcacctataatcccagctacctgggaggctgaggcaggagaatagcttgaatcttggaagtggaggttacagtgagccgaaatcacaccattgctctccagcgtgggcgacagagagagactccatctcaaaaaaataaacaaataaataaaaataaaaaaatcaagtcacttcttaggccctctcggccacctcccttgtcttcatctgcctggcactttccctcccaagtgtgtttctcttttgttactgctaccacgtggcagtctccacctcatgatgaaaggcaaactggacccggcacggtggctcatgcctgtaatcccagaactttgagaggctgaggcaggaggattgcttcagcccaggagtttgaaaccaggccaggcaacatagtgagaccctgtctaatgaaaagttaaaaaaaattagctgggtgtggtggcgtgcacctgtggtcccagctgctcaggaggctgaggtgggaggctcacttgagcccaagaggtagatgctgcagtgagcagtggtcacaccactgcactccagcctgggccataaagtgagaccctgtctcaaaaaaacaaaaggcaagaagcaaactgggctggacacagtggctcacaccagtagtcccagcactatgggaggctgcagggggagaatcgcttgagcccaggaatttgagaccagcctgggaaacaaagcaaaatccatctcacaaaagcaaactgtgtctttcatctcaagcagagtaaaacccaaagccctcaccgtggcccacaaggctccctggcctcccacactgtccccctcgcttatctgccccagccacgcccacctcctggctgccctcgagcctcctggctgctgccatctcccaggctatgcccctgtggcttcctctgccccaattattcttcctccaaaggatctgggctgctccctctctcaatttaggtctttggtgaatgtcacgtcagggaggccttttctggtcaccctctttaacccacaactcattcccgaactttctctgtgcagaaaagagttaacctggcaggctccacaacagactgctgtccttagacaggcctgggtgcacagttggtccttggctgggaacttgggtgttggggggggggtcttatcacttcctgatagagtggctcgctgcatctatctaggctgttcgtgcaggcctagagtggcttgctgcatctatctaggctgttcgtgcaggcacaggccttctttctgggagcctggcattttggtatatgttggagagaaggtgctcttgtggccgcccccatgaaaccaagggcgctgaggctaggatcagagtgtccctggctgacatttcacacgtcaccatgatccactgctggaggaattaggtgtggcctctggaagtgcatgcctggtttcccgagttcactccatgcacctttccttttggctgacttggctccataccctttgatgagagtaaatcagagctgtgagtgcaattgcatactgagtccccagtcccagagaaccatcaaacctggggtgctctctgattcctgagtcctaaagaaccatcaaacctgggggtggtctcggggacccccggcacactgtccttctcaactcttttctcctcctgaacactcaccaccattgggcatcccataatattttacctgtttaccttgtcatcgtcttgcccacaccccaggttccaccccaaccctgctctgtgcagtattcccagctccacccatagagacccacagaagatgctgggggaatatttcctgaatgacacccataacagctttattttcaaaggcgggatccctccccgggcttgtgatgggacggcgctgtgggcccgagcagcagagccgtgcaggacaggcatgggcaggggtggggcagctggcccgggaggccggcaggtcccagaagacacctcacacgggttccatctgcagctcctccccgtccacagcctcaatctggtggaaggcagcgtgggagccgatgaccaccagggtggctcctgcaggaaagccggcagctcagggccacactcctgcacctggctcccaccatccaccccagctgctcagaccctgtactcacccagcacccagaagacggccgagcccgcaccagccagccagaagaaggggaaggagatgcctccagccagagcatactgatgcgctgggctcacctctcggcctgggggcagatggcattggggtgctgttccgactctccatgccctctcccagagtaacccctgctgccccccaacaatccgtacaagctccaggttctcgggatcgaatccaaactcctcatgccaaggccctccaggtcctggggtcaccctgttcccctgctgtccccactgccctccagaacacagcacaccgtcctcgcctgcctcagccccaccctctgccctctgccccacatcctccaggaagttcctgggatcccggcttcctgctccctagactagggctctcctgctgcaaccctcgcgcagaccagggtctcaaactggtggcccaagggccaaatctgacctgtggatgtgttttttgagctgttttgcaaggatgtgatttgtggctggcaaagtgaacgatttcacataaaaataccaacttcaggcttctcatagaagtctcagggatggggtctacatgctctggtgacggtgatcagctgaagccaagtcgtgcctgtgcttcaggcactccctccaccccagcccatcaagcacataacttgcaggcccctgaagagcctggccttcaggtctacctaactgtccaatcccaactccctgaccccactccaaaccttgattttcccctggggggaatttcccctggcattttgttttcccagtggtccttggtactactagtctgggaaccacatgaaacatactcctcggcttccctctctaagttccaagttctttctggtcacaccccagaaagcaggaaaagaaacgggaacagatctaggccagtgtaaggtggccacctggtgtccagtgtgggcacctgcagctgatgttggccgcagagagcggcaaggggaggagagagaggggaggagtcatgtggtttgaaaaggagtaggtttaaggcacagcagccaggtggatcctgggtttgaggaatagcaatttgagggggctgagactcgatggaaggatcggttgtgtctgagattttaagggatcaggtttgggggatctagtgtacatctaggcttgggcggacttgggttttgaaggacttggatttggggtctgaggtctgtctgcattccaaaagaccaagatttgagggaccaaggattcatctgggcagggggtttctcaccaaagagcacaagcttggactccaaggtgcgcagatagagaatgtaacaggcgccgaaaaagacagccagagccaccagcaacataggggacgtcaccctggaggaggagtgcagggaggcagcggttagacagctggggctgggccagcccgacggccctggccttctccaccggcgggcggcaagctacatcctggagaccagggagggccaggtgacatttagtcacactgcatcctggccagggtgatggtggggtaggggacctggccctttggtgacaaggtagtctagcagagccaatccttgggggcggggcctgggcggtgagaagagggccctgggcggtgagaggagggaccgggcggtgaagggcggggcctgagcggcgagaggaggggtccagccggtcggggctagtgcgggtgcggggcccgggaggcactcacacacagtacaggatgaggcccaggaacacgaacacatagttgctctggtagtactccacgttgcgtacgaggcgctggcacagctctcccaggttgcggggccgtgagaagcgctgctggtccacgaaggtgctccagggccggatggtcgcgcggcgccgctccagccactcccggcctgcaccggagggaatcagcttcggcagcagggtcctgcggggggtggggccgggtcagtggtggaccgggatggagccccagacccccgcaaaagaaggggactaagggtgcctggactccctcccgggaccccagattcctgtacagcaggcagggaggggactaggggcccagactccagggtcccattagaggagaccggggccaacacttctgcggctcggggctgggactccaggctctcgagggaggagggaggagggggccgggggcccggactcccgggtctctggtccgagggcctagagccagctcgctcacgtgccgctcagcccttccgcctcggcatctttctgctggtccttctgcgctgccatgtctgcgtcgtgaggggtagagctgctgtaaccagcccggtaccctgaagaccccgccggccccgcccgacgccggccccacccagcggagtcgacgtggcgcagccccggagcagctggggactgtagttctgccgccgagtattgtgggagttgtagtcctgacggtgactaagaggatgggcgctatgatggcggtctgactcgcaaaacaccttgggagatataatcccagaaagtgacggcgcgcgcctctgggtattataggagttgtagtttcaggagggtgcatgtgggctgtcaggagcgagggcgttatgggaactctaacggcagaagcgggcgttgtgtactctcccagggaaggcacaatggggaccgtgcagagctgtccttctgactctagagggcataaaaaaacacctggagggcttgctaaaacagattcctgggccctagcccagatgttttcattcagcaagtctggggtggagcccataatttccatttctgagttcccaggtgatgctgatgcccctggtccatggactacattttgagtagaaagatttagataatttgtgggaattgattccttcctcaagagattgaggctagtgagggggccatggttgctggaggggtatctgaggttgccccctgccccaccttgtggagtcccaaagatgaatgagttggggctagggacacctccgaccccgccacacacacctttggagagaagggagtgaagttgggaaagacaaaaggttgagaagttttgtgggcttttttgaaatggagtctcgctcttgttgcccaggctggagtgcaatggcgcaatctcggctcactgcaacctctgcctcctgggttcaagcgattctcctgcctcagcctccagagtagctgggattacaggcgcccgccaccacgcccagctaatttttgtatttttttagtagagacggggtttcaccatgttggccaggctggtctcgtactcctgacctcgtgatcttcctgtctcagcctctcaaagtgctgggattacaggcgtgagccattgtgcctggcccacagggctggaattctaattgaattctaatggggtgaaccagaacagggcctcaagaaatgtgtgtggaagtatagggaagcctgggctcccttaagcagactgggatcctaattttccaaagcagctgggtggggctggaaggaaaatatctatatgggataaccaggtgacctttttttttttgaaaatttttttaagtagataagggattttgctgtgttggcccagtaggtctcaaactcctggactcaagcgatccttctgcctggccttcccaagtattgggattacaggtgtgagccaccatgcccaggttcaagtgacttttttttttttttgagacggagtctcactctgtcgccagggctggagtgcagtggcacaatcttggctcactgcaacctccacctcctcctgggttcaagcgattctcctgcctcagcctcccgagtagctgggattacaggcgcccgccactatgcccagctaattttttgtatttttagtaaagatggggtttcaccatgttggccaggctggtctcgaactcctgactttgtgatttgcccgcctcggcctcccaaagtgctgggattacaggtgtgagccactgcgcctggccccaagtgactcttttaggcccagctcttgtcttccaagatctacagcagtttagggtttgtgctttgaggcctgctggaaggtgttcccaggaggtgggaggaagatggccctgtctgaggggctggtggcgcaataggcagggaagccctttgcaagggccccacactgaagatggaagagttacactttgaagatcagattggctagttactgtttatttcctctttgtcacccccaggcttttagtggaatcaggtttcctttttttttttttttttttttgagatggagtttcactctgttgctcaggctggagtacagtggcacaatgtctactcactgcaacctccgcctctcgggttcaagcgattctcctgcctcagcctcctgagtagctgggattacaggtgtgcaccaccatgcccagctaatttgtgtatttttaatagagacggggtttcaccatgttggtcaggctggtctcaaactctgacctcgtgatctgcccacctcagcctcccaaagtgctgggattacaggcgtgacccatcacacctggcctggaatcaggttttctaaataggattcaaacttgaaaatcaaaggaggactgcggggctgggcgtggtcctgtaatcccagcacttatgggaggctcaggagggtggatcacttgaggtcaggagttcaacaccagcctggccaacatggcaaaagcccatctctactaaaaaaaaaaatacacatgcctgtaatcccagctactcgggaggctgaggcaggagaatcacttgaacccaggaggcggaggttgcagtgagccaagagtgtgctatcgcactccagcctgggcgacagaatgagaccctgtctcagaaaaaaacaaaacaaaacaaaacagaaaacaccaaaggaggagtgcaatagcacaattagccccgagcaggaataggggagcagcatctgaattcaaagggccaaagcagcagaggtagcccttggaagaacctccaccgaaagacagagcttggggaatagaattgggacagagctccagctgcctctttggtggcaggccgtaggagattcaggatggacttttgttatgagagctgttgggtttccttataggaactgaatgaaagcaatttcattccaaaacccactggtctttgttctgagcagagaacatagaggcagaggcctggaggtgtcgaacagcgcaggccatggcaagagacggggagggggacagtggagtctgaggggcaaggacattgcaggaggggtcctaggagtgggagggtggggggggactttgaataagggaatttcaggagatgggacctggacacaggggtaatgtgggagaggagggcctgaggcagagacatcatgagatggtgagaaatggggtccctgagggaaggggcctttggcagatgggccctgaattaggggggtagggggttggtgtgctgggagatgagggggcacctgagaagattgtgagtcccaggccaggtgtggctcacgcctgtaatctcagcactttgggaggccaagatgggcggatcacttaaggccaggagttcgagaccagcctgcccaacatggtgaaaccccatctttactaaacatacaaaaaaaaattagctcggcgtgatggtgcacgcctgtaatcccagctactcaggaggctgagtcaagagaatcgcttgaacccaggaggcagaggttgcagtgagctgagactgtgccactgtacgagaccctatctcaaaaaaaaaaaaaaaaaaaagaaaaagatgggtgcctccagcctgaggactcctccctccctcctgggatccccaaggaagcggtgctgggaaagcaggaagaccttagcacattcagccagaaatgtgggtcactgtccctgctgtgtgacctcaaggaaagccctcccgtctctgggcctcagtctccccacctgtctatgggagcgtctcttcccctgcaccagaaaaattaaacagtatgtgtgggtttcctaggagaggtctgggctcatgtagcccctaccaggaccaggctgtactctggggtcaccaggggtgcccagcgcacatggcccctgccctccaactgcctttccccctcagattcgggagtttctccctcatccattgtcttgtgcagtgggtgtgtacatgcacttgcacactcacccactcacactcactctcagcatcctggccacagacactggcattgggaggcaggcaggcccaggcctggccccagcccctcctctgacttgcctccctgagctgtgttaggaaggctgcctcgagggaaatggattcactgccccaccaaggtggcaaaaatgaaaaggactgacaactcccagtggaggaaggatgtggagcagctgctgcttccttacactgttggatgcagaatggcactcgaactttggaaagggtctggcaacgtccatgaaagctaaacatggtctatcccatgaaccagcaattccactcccaggcacgcgtgtacccaacagagtgcacatctgtcattaaaagacacaactagagggctgggcgcggtggctcaggcctgtaatcccagcactttgggaggccgaggtgggcagatcacaaggtcaggagttcgagaccaacctgaccaacatggtgaaaccccgtctgtactaaaaacacaaaaattagctgggcgtggtggtgcacgcctgtagtcccagctactcgggaggctgaggcagaggaatcacttgaacccgggaggtggagattgcagtgagccaagatcgtgccagtgcactccagcctggtgacagagcgagactccgtcttaaaaaaaaaaaaaaaaaagaaaggccgggcgcggtggctcacgcctgtaatcccagcactttgggaggccgaggcgggtggatcacgaggtcaggagattgagaccatcctggctaacacggtgaaacctcgtctctactaaacatacaaaaaattagccgggcgtagcggcgggcgcctgtagtcccagctactcgggaggctgaggcaggagaatggtgtcaacccgggaggcggagcttgcagtgagccgagatcgcaccactgcattctagcctgggcgacagagcgagactccgtctcaaaaaaaaaaaaaaaaaaaaagacataactagagggctgggtgcagtggctcgtgcctgtaatctcagcactttaggaggctgaggtgggtggatcactttttttttgttgttgttgagatggagtttcactcttgttgcccaggctggagtgcaacggctcgatctcagctcactggaacctccgcctcccgggttcaagcaattctcctgccccagcctcccaagtagctgggattagaggagtgtgccaccatgcccggataattttgtatttttagtagagatgggggtttctccatgttggtcaggctggtctcgaactcccgacctcaggtgatctgcctgcctcagcctcccaaagtgctgggattataggcgtgagccaccgtgcctgttttttgtttttctttttagatggggtctcactctgtcacccaagctgaagtgcagtggcgtgacctcggctcactgcaacctccacctcccaggttccagtgattctcctgcctcagccctgtgagtagctgggattacaagcacatgccaccacgcccagctagtttttgtatttttagtagagacggcgtttcaccatgttggtgggcggatcacttgaggtcaggagtttgagaccagcctggccaacatggcaaaacccagtctctaataaaaatacaaaaactagccgggcatgttggcaggtgcctgtaatcccagctacttgggaggctgaggcaggagaatcgcttgaacccaggaggtgaaggttgcagtgagctgagatggtgccactgcactctaacctgggtgacaaagcaagactccatttcaaaaaaaaaaaaaaaaaaagacatgactaggatgttcctgtccctagcagcaccaattgtaatagccccaaactggaaacccctaagtcccccaacaggagaatagacaaattgtgttatagtcccacaatgggatgaaaaggaaggggccacagatgcaggtgacaatatggatgactcctatagacataatgctgagaacaaggagccagacacagagatcacatgctgtaagatttcatttgtatgaagctcaagaacaggcacaactgatgtgtggtaacagaaaccagatcagctcttgcctctggaggggaggcgactggaggggctccagtgaactttctgggtggagggaaaggttctatgccttgatgtgggtggtagctttgcagatgcaactttttttttttttttgagacgggttctcgctgttgcccaggctggagtgcagtggcatgatctcggattactgcaacctctgcctcccgggttcaagcaattctcctgcttcagcctcctgagtagctgggattacaggcatgcaccaccatgcccagctaagttttttgtttttttgtttttttgtttttgagacggagtctcgctttgtcacccaggctggagtgcagtagtgggatcttggctcactgcaagctccgcctcccaggttcatgccattctcctgcctcagcctcccaagtagctgggattacagatgagtgccgccacgccaggctaatttttttttaatttttagtggagacggggtttcaccatgttagccaggatagtctcgatctcctggccttgtgatctgcccgcctcggccttccaaagtgctgggattacaggtgtgagccactgcgcccagtttttttttttttttttttttgtatttttcgtagagatggggtttcgccatgttggccaggctggtctcgtactcctgacctcaagtgacccgcccgcctgggcctcccaaagtgctgggattacaggcgggagccaccgcgcttggcctgcagatgcaatttttaaaatcattgagctatacccttaagatgcgtgcacttcactgtatgaaagtttatctcaataaaaagagagaatagcgtagtgacctagaactttggacagccttggttcaaatcccagatttgtctcttcttagctgtgtgcaaatcacttcttctctctgtgcacatttaatgcacacttagaagtgggcagagcacatagcaggcactcagtgaatcactgtcatcaccatcatcatcgtcattgtgtcccctgggtcctactcctataggagaggctcccagtcaccatcccacgtctgcttccctccctctcccctgttctgattccacaatgccatcgcctggtgaattcaagctgctctgactttcgtggagttgaaaactccgtgattagatggctctgagattccgtgacttccaagccagtgccaggctaagttcctgcagtttcgagagtcgcctggcagcgcgccccaacagaggggatgctgtcccagccgcagtccccgtctggaaagcaggcacaacacacacaccgcttctctctccccactgatatatttgataattgtccagaaccagagatggcatcagccggggggctgaaggggagtaaaaaagagcccagggaggtggctggggcgggaggaatggatagaggggtgaggagagggagagaaactgacacagaaaagagagaggagagaggtttggggcaggggagagaagccagccagagtgggggcggcaggagatagtggagggggtgggggccaaggtggggccacaggaagagagggctcctccccccagaatacaaaattggggggactgacaggggcggtcctgggcctgggggacggggaagagatgggcgatgtggtggggctgaggtcagtagtaggtttccttctccacccaacctggagagacaaagaaggaaagaaagagacagagtaagagatggagagagacaggcaaggcgagccgcccagcagagagagggacagagagggagagagacaaggaaaccacacagacagagacccgtgagaagacagagtgggtgcccggagagatgggaagagagagaagagtgggaaccaggtggcagagccatccagcagggcgaggggagcctgggaccagctgcctgagaccctgctgccccccgcccccctcggctgccttgccgagctccctcaccccctgggttcctgcgcaggatgagtttgcggatttcgtcgtagacgaagatgaggaaactgtaggggaaggcacagaaccaccagctgggcctgcagaggggagagcaggagggcttgagtgcggggccctaacgagaggcagagtttcaggggactggaggggacgcagaggggcagtctcccaggatccttcgtgctcacaggtggagggtgccctgggcggggctggggcctggggtcttcggagtaatccgtggtgggagcagcctatgggggaggctcgggggcatcagaatggggactgcagtggggacaccaggggaggtggggcctgaggttcaggctgagtctaagggaaggctccatggcaggcgctggtgtgggcagggctgggggcagcggggcactcacttgagagggtacatgcgcagggccacgtccatgccggggcagtaggacaggaaggcagccagggccgtctcctcaaacagcccgaagatcaggatcttgttcctggaggcacagaagggcagggctgggcccagagagcacccaccctgcacctgccaccccgcagagacagggggaggcacagtgcagacacccagagacagcagcacagacacagagacagagaggcagagacatagggagagacagagatggggagacatgccccgacagagagagacaaagatagaggcagagcgatggtgacacagaaagagacaaaagacagggacagacacagagacagggacagacacagagacagacagggacagacagagagacagacacagggacagacacagagacagggacagaaacagacacagagacagggacagacacagagaggcactggtataaaaagaaaaggccaggggcacctccaccacacacacagaggctgagagagaatctaggacacacaggaccccttgagagaaaatcagtgcagtggcaaaacccaaaatgggctgggcatggtggctcacacctgtaatcctagcactctgggaggctgaggcaggaagattgcctgagctcaggagtttgagaccagcctgggcaacatggtgaaactctactaaaaatacgaaaaattagccgagcctggtggtgcgtacctgtaatcccagctacttgggaggctgaggcatgagaatcgcttgaacccgggaggcggaggttgcagtgagccaagattgtgccactgcactccagcctgggcaacagagcaagactctgtctctaaataaataaataaaaattagccatatatgatggtgcacacctgtagtctcagctactcaggaggctgaggtgggtgggtcacttgagcccaggaggtcgaggctgcagtgagctatgattacaccactgaactccagtctgggtgacagagtgagaccctgcctcaacaaaacaacaaaaaaccaaagcaaggacacaagaggaagtacacagacagacagacactcggacaggacagatggctgtccagtcaccatgtgcccccggccctcacttcatgccctgctggaagaccgagttcctccgggtcttgcagatgatcagatcggcccactggacgacaacgatgctcacaaagaaggccgtgtggcaggtgaactccaccaccttcctctgctcgtatgtctgcaggagcggtgaccagggcacgggacgtcagttagtggcactgcagccctagccgccaccccgacgttccggtgctctttgccccgccccatcctgcatggggtcctcagggcctcaggtgtgtcttccttctgcgggctcatagtcccgagggaggagtcaggagacgtacaaggaagaagaaaggttaatggtgatctcaccatccaccaggggccagggaggaggataaggaccctgtgggcctcccaaggaggacagacagcaactgggctttgaagggacagacagaggtggggaagaaggcctggcagggcagagagctccagcagtgggacacaaggctccagatgggctgggccaagggcatccaggaagccccaggtgcccagcaaaggccttgatgctgccatgggagactgagggggccatcgtaggaagtggccatgcatggctggaacagctcaccccggggatcttacggtgggcagagacacagcaccctgccctactcacccactgctgcccgtaactgtcttccaggtcattgacggtgcggtcatcccagttcagccggatgcccaccaggttgccgggcaagaagccattttctgccaggatcacaaagtaagagaagaagccaccgagagcctggatcattcctggaaggaggagagaggaagccgaggagaggctcagattggggccagcagccaacccagggcacctcagagggcccggaggcctccttggagaggggagtatgccctcctggccctgttatctggacattggttcccagagggtgacctgaggtctcacttggtggtgaggccctgagatgggtgggccacctgggacaggggctttggagagagggctctcccagagggataacctggagcccctctctcacctgacctaggccacctaaacatcatgaattcttgggggatccccagcttgagctccctacgcaggaatgacctccctgggcctggaaccactgccatgaagtctctgcttgctgggacagcccccaagggtggctgctccactcctctggggatccgcacacatcaacagcagagaggaggaggtggagaaggatggggtgcagaccccccccacagatagctcactggttggtcctgcccacgtctgctcccctgagtcaatgccagggtcccaagcacccacggtgggccaggcactgctctaggcccggcactgggtggtaaggagatggagtccccggtgcctcaccaatctgcccgtaggccatgctgatgagtctctcattgaccaatttgtccgtccgcgggttcctgggctgtctcttcatgatgtcgctttcggcagcctcgtacgccagtgagatggcagggacctaggcggaggaggccgggtgagccggagaggggaggactccaccctcctgggccccaagggtggctgccagggctcaccatgtcagtgcccagatcgatgcagaggatggtgatggtgcccaggggcagcgggatgttggccatgatgaacagcaggaagggcgtgatctccgggatattgctggtcagggtgtaggcaatggacttctttaggttgtcgaagatcaggcggcctgtggcacaggcaggctcagagcaggcgcccatgccagggagccccactccctctgcccctcctctgccctcatccaacgtcctttttttttttttttttttttttgagacagagtctcgctgtgttgcccaggctggagtgcagtggtgcgatctcggctcactgcaggctccgcctcccgggttcacgccattctcctgcctcagcctcccgagtagctggcactacaggcacctgccaccacgcccggctaatttttttgtatttttattagagacggggtttcactgtgttagcctgcatggtctcaatctcctgacctcgtgatctgccctcctcggcctcctgaagtgctgggattacaggcgtgagccaccgcgcccggcctgtccagcgtccttttctaccccccagcccacccaccattattttctttttgggacagggtctcactctgttgcccaggctgcagtgcagtggcatgatcacggctcactgcaacctcgactcccaggctcaagtgatcctcctgcctcagcctcccatgtagctgagactacagtcacgcgccaccacgtccagctaatttttgtatttttagtagagacagagtctcaccacttttcctaggcttgtctaatttctgggctgtgattccatctcagcctcccgaagtgctgggattacaggcataagtctccacacctggcccctcacccacctacctttccacataaacatccaaccacatcgcctttgtggaaacattcttgaaataaccactttggaagatggtttcggagttgctatcaaacatcccccaccccaccgaccgagtaatccgactcctaggttttatacccaaaagagaggaggactgtttatgcccagcgaaaagcaagtacgagaatgttcaccatagcaccactcatcagagccaaaagccagagtcaaccccatgtccatcaacaggtgagggatgaataaaccacggtacatccatgcagtcaaatactacacagcaagaaggggcgagctacggacacaactccacagctggaccttggatcccgtgctgagtgacacgagccagacacaaaagcattcttagcatccaactccaactggagcaggctcagcacccgtctctgggctaaaagtcaggataatggttatgtctaggaggagggatatagactggaagagagcagacaaaacctaaatggggggctggaatggttttctatcttgactggggtctggtggttgcatggctgtgtacatgtgtaaaaatttatacaccctgtctggttgaatattttaatgagatataatatgcccaactcactgtatgcatgccatatctcaataaatattcaaccagtacaggttgtctaaagtaaacaaaataaagattaatccaggccaggcgctggggctcacacctgtaatcccaacactttgggagaccgaagcaggaggattgcctgagatcaagagttcaagaccagcctggccaacatgatgaaaccccatctctactaaaaatacaaaaattagctgggcgtggtggtgggcacctgtaaccccagctacttgggaggctgaggcaggagaatcatttgaacctcagaggcagacgttgcagtgagccgcaattgtgccattgcactccagcctgggcaacagagcaagactccatctcaaaaaaataaaataaaataaaataaacattagtcaggcacggtggctcgagcctgtggtcgcagctacttgggaggctgaggtgggaggatcacttgaggaggtcgaggttgcagtgactgatgattgcagcactgcgctccagcctgggcaacagagtgagaccttgtctctaaataaataaataagtaaaaagattagcccatgaacaatgaggtcaatcattaagaaagaacaggcgggcacggtggcaaacacctgtaatcccagcactttgggaggctgaggcgggtggatcacgaggtcaggagatcgagactatcctggccaacatggtgaaaccccatctctactaaaacacaaaaaattagctgggagtggtggtgtgtgcctgtagttccagctatgtgggaagctgaggcagaagaatcgcttgaagctgggaggtggaggttgcagtgagccaacatcacgccactgcactccagcctggcaacagagcaagactccatcaaaaaaaggggaggggaggggagggggaaggaaggaaggaaggggaaggaaggaaggaaggaaggaaggaaggaaggaaggaaggaaggaaggaaggaaagaaggaaggaaggcaggcaggcagggacggagggagggaggaagggagggagggagggaagggaaggtgaagcaggctgcctgtggtgtggcttctttgattgctttgatgtctcttgcatagcaataagggcctgggccgctcccacctgatattctcgttccctgcattgtgctcttctccacaaactaggggtttctcatcctaaactatttatggatgaaatggtgacaaatgtgcatcagcataatccagtgtgtgttccaggtggtggggaagaaacaaggtgtgccgtgcgctgactgccgctgcaggtgggatggaggcgcaggggcccactgtgcctttgctttacttttgggtatatctggaatgcccccgttggaagttattttgtttgtttgtttgagacagggtctcggatctcgctctatcccaggctggagtgcagtggcaccatcatggttcatggcagcctcgaccacccaggctcaagtgatcctcctgcctcagccccccaagtctctgagactacaggtgtgcaacaccacgccctgctaatttttaaaattttttgatctttgaggtcttaatttgttgtacaggcaggtcttgaactcctgggctcaagcgatcctcccgccttggtctcccaaagtgctgggattacaggcgtgagcccccgtgcctggcccctgacggaagttaggtatttcttccctcacttcagagaggccttccctgtccaccccatctgggcaggaccctcactattatctatcacagcggcctgctttcttcggggcatatatcacaatttgtaattacatatctgttaacttgtttaaggctgtctctccagccctgtgagaacagggatggtgtctgctctgctcacagctgcctcccaggcttccagcatgatgcacaagattcggaaggagcagacggctgtatctgagacagtgtgtgtactgtgtatgcatagatgtcttggggaggccaggcgtggtggctcatgcctgtaatcccagcaaattgggaggccaaggtgggaggattgcttgagcccaggagttgaagacctcgctgggcgaggtggctcacccctgcaatcccagcactttgggaggccaaggtgcggggatcacttcaggtcaggagatcaagaccagcctggctaacatggtgaaaccccatctctactaaaaatacaaaaattagcctggtgtggtggcatgcacctgtaattctagctactcgggaggctgaagcaggagaattgcttgaacccaggaggtggaggctacagtaagccgagattgcatgcctgtactccagcctgggtgacagagcaagactctgtctcaaaaaaaaagaaagactagtctgggcaacatggcgaaaccccatctctacaaaatcttaaaaatcagccaggtgtgatggtgcatacctgtagtctcagctacttaggggcctgaggcaggaggatcgattaagtcccggaggtggaggctgcagttagccgtgattgtgccactgcactccatcctgggtgacagattgagactctatccccgcccccagcccccaaaaaaagatgtctcttgggagataagaaggtgttaaccatggtttcctctgggatataggagacaagggctgaggacatttaatctgttactctgggctcggctttgccgtttgaattctcttttaccatgaactactttttacaccagagacatttcaaataggagagagaaattggaagaaaatccaccaaggcatgaaccgtgattatttctggatggcgaggttacgggtgattctacttttttcctgaatgcttttctgcatttgtctatgattatcatgaattaatttgatgatcaaaataaatctgaatgtgaaccaacccttctgtggccttgtctgggcctgtcaggaggtggtgcctgtcggctcagcagcaccagcctcagacccagcccctcacaccgccttgcctgtgtaccggttcctctgcctgcgactccctggcactagtctatgtggacgtcacagcatggcccctgacttggctcagccatccctgtccactctgggaagctcccttgacccccagcccaggctggcagagggggtatcccccagggtccctggcttccccctggttgggcttgagaatttttttttttttttgagacggagtctcgctctgtcccccaggctggagtgctgtggcgcaatctcagctcactgcaacctccacctcctgggttcaagcaattctcctgcctcagcctcccgagtagctgggactacaggcaaccgccacaatgcccggctaattttttgtatttttagtagagacggggtttcaccatgttagccaggatggtctcgatcttctgacctcatgatctgcctgcttcagccttccaaagtgctgggattacaggcgtggctgccgcccctggctgagaatatctttaaaaagcctccaagtcagcttcacccaccagatggggcctgggctggatgacgcagggaccctgaagtgtgtcagctcagtcctgcccaggggagctcccgaccccacaggggaggaagacagaaaaggacaggctcaggctcctccagggccagggggcctgtggtctctgccacacatccccctgcagccctggccagttccccttgctggtctcaggcctccggtagtgaccctggtctccagggccacccctggccaactcaccctcctccacccctgtgacgatggaggcaaagttgtcgtccagcaggatcatgtcagctgcctgcttggagacgtcagagccagcgatgcccatggccaccccaatgtcggccttcttcagagcgggggagtcgttcacaccatccccggtcacagccacaattgcaccctggagggagagagggtaaggatgacacccagaggccagtccccagagtcccctccctcagatccagaagcccaggaccccagccccctcctccttcagacctagaagttcaggtccccaacctcctcttcccctcagacctaggagttcaggcctccagaccttcctccctcagacccaggggtccagacccccagaccctcctccctcagacccagaggtccaggcccccagcctccttctccctcagactcagcagtccaggcccccagaccctcctccctcagacccaggggtccaggcccccagcccctcctccctcagacccaagggtccaggcccccaccccctcctccctcagacccaggagttcaggcccctatcccctcttccctcatacccagaagtccaggccccctccctcagacccaagggtccaggtccccagccccctcctccctcagacccaggagtccaggcccccagaccctcctctctcagacccaggggtccagacccccagcccctcctccctcagacccaggaaaccaggccccggcctcagtgaggacccaggagtcaaggccccgtcccctcctctgcgggagcgcagcccacctgtctctgacagccctccacaatgatgagcttctgctggggggatgtgcgggcgaagacgatctcggtgtgattctgcaggatctcgtcgatttgctcggaggtgaagtccttgaggtcggtgccgtggatcacgcaggccttggcatccctgggaagagcagagagagcgatggctgaggtcagggtgtgtgaggagtggcaaagtgatccctgaaagacagagaaacagaggggccagccccacaaccaggagagccagaggaccaggggctgggggaagaggcctctgggagaagcaggggagaagggggctactgcagcagggcgtgcgggcagacctgaggaaggactttggggcagtggatttatttatttatttatttattatttatttatttatttttgagatggagtctcgctctgtcacccaagctggagtgcagtggcgcaatctcggctcactgcaacctttgcttcttgggttcaagtgattttcctgtctcagcctccctagtagataggattacaggtgcccaccaccacgcctggctaatttttttttaatttttagtgcagatggggttttgccatgttggccaggctgctctcgaactcctgacctcaagtgatccacccacctcggcctcccaaaatgctgggattacaggcgtgagccactgcgcccagccaagacacagtggattcagaggaacggagataaatggacaagctgaaggaaggcagagtcagagataggtatgaggatgggaaagttgaagaagtcagaaaaacagaacagaaaagagagacaatgacagacagacaggaaaaaagagagacagacacagaagtactggattctactgaatcctctgagataggaattattagtagcccattttagagatgggcaaactgaagttcatggatgctaaaggacttgcccaatgtcacacagcttgtgagcggtataagctggaatgcaggccgggcgcagtggctcacgcctgtaatcccagcactttgggaggccaaggcaggtggaccacctgaggtcaggagttcgagaccagcctggccaacatagtgaaacccccgtctctactaaaaatacaaaaaaaaaaaaaaaaaattagcggggcatggtggagggcccctgtaatcccagctactcaagaggctgaggcagataattgcttgaacccgggaggcggaggctgcagtgagctgaggttgccccactgcactccagcctgggcgacagagcaagactccatctcaaaaacataaataaataaataaaataaaataaaggctgggatgcaaacctatgcctggctacctctgtggctgcaatgtccccacaccggagggagggccagacccagggcctggtccatggaggagtcccagaaagaatgggacaggcagtgcagagggaggttggggggaagcggtccccctgtgtcaacaccctagagggatgtccagggccctggctgggatgggtggctcaccgggggttaacctggctgacgggaatgttgagccgggcggcgatgtcctccacagtctcgttgccctcagagatgatgcccacacccttggcaatggccttggccgtgatggggtgatcgccggtgaccatgatgacctgcaggcattgttttttagggatggcctctcccgccccacgcctggctttgcctcccccagccaccccaagccacaccttgatgcctgcgctgcgacacttgcccaccgcgtcagggacggctgcccggggtgggtcgatcatggacatgaggcccacaaagcagaggttgtccgtggtgaagttcacgtcatcacagtcgaaggcaaagcccttggggaactgctcctcgggcaggtaataatggcagaaacctagtggcagggaagggttggggtgtgagggtcccagcctcggaacctccgccccatgcccctagatgtctgcatcgcccgcattccatctccccatcagcaagacggccagtcagcattcatttcctaggataccttcccctctcatccatccattcattcattcattcattcatttacagtatattctgggaggccctgggctgagacaggctttgggcagcatcacaaccctccttgccctccagggaccccagagcccgcccggcagcctcgcaccaagcacgcgctcgcccaggccaccgagctcaaggtaggcattctggaaggcctccttcatttcctcgtccagaggctgctccttgccctgtagcaggatggtggagcagcggtccaggatgcgctcgggggcacccttcatcaccagcaggtatcggttgtcgttggggtcctcggtctcatggatggagagctggggaccgatcagagggtggcgtgcctgagccacgcagacaccaggaagctccctgccccatcctgtcccctgtccagagccacgggtgccaggataggcccacaccagggctcccccacactctctcacagagacctctgctcattcctgtccgctctgtctatgtcatggatatatatttctttttctttttctttttttcttttttcttttttttttgagacagagtctcgctctgttgcccaggctggagtgcagtggcacgatctcagctcactgcaacctccacctcctgggttcaagcaattctcctgcctcagcctccggagtagcttgggattacaggcaccaccaccacacccagctaacttttgtatttttagtagagacgggattttgccatgttggccaggctggtcttgaactcctggcctcaagtgatctgccctcatcggcctctcaaagtgctgggataacaggcataagccaccacgtctgtgctcccctcctcccaccctgttttttttttttaagacagggtctcactctgtcacccaggctggagaacagtggcgagatcacagctcactgcagccttgatctcccaggctcatgcgatcctcccgcttcggtctcccacgtagctgggaccacaggtccacaccaccatgcctggctaattttttatagagacatgctctccctatgttgcccacgctggtctccatctcctgagttcaagcgatcctcctgcctcggtctcccaaagtgctgggattacaggcgtgagccaccacacccagctgtatgcttccatttttatgaaatgtccagaataggcaaaaccatacggacagaaagtaggttagtggttgcttagggctgggagtgtcggggaggagggggcgggtgacagctgagagatgtggggtttctttttggaggtgatgaaaatgctctaaaattgactatgtggatggctgcctatatctgcgaatatactaaaactattaaattatacacttagagggacgagctatggtatgttaattatatcttaataaagttattttaaaagctctgagtcaactcctgtctctctttggctgagagccccctggaggcttgtgtgctcctcagagtcacagccaagtcctctccatgcccgtggggcctgacaggatctggccagcacccaccacccccaccacgctccctggctcccagcccctctgcactggctggctggctggtgttcagatgcgtcagcacactcccgcctctgggcctttgcacaggctgtgcctgctaccggagcgctcttcccccagacacctgcagggttccctccctcagcaccacaaccactacgattacctcctcatgcctttgttattgtctgtcttctagaaccagagcgtaagtctcagagaggggtgacttcaccatgtcactcactactgtgtgtacacccagcacccaaaacagggcctaacatgtggtggctggtcaaaaaatgtatactgaatgggccgggcatgatggcttatgcctgtaatcccagcactttgggaggccgaggtgggtggatcacttgaggtcaggagttcaagaccagcctggccaacatgatgaaaccccatcaatactaaaaatacaaaaactagctgggtgtggtggtgcacgcctctaattccagctactcgggaggctgagatatgagaatcacttgaacccagagacagaggttgcagtgagccaagatcacaccactgccttttagcctgggcgacagagcaagactccatctcaaaaaaaagtttactgaggccgggcgcggtggctcatgcctgtaatcccagcactttgggaggctgaggcgggcagatcacgaggtcaggagatcgagaccatcctggctaacacggtgaaaccccgtctctactaaaaatacaaaaaattagctgggcatggtggcgggcgcctgtagtcccagctattctggaggctgaggcaggagaatggtgtgaacccgggaggtggagcttgcagtgagctgagatcgcgccactgcactccagcctgggtgacagagcgaaactctgtctcaaaaaaaaaaaaagtttgctgaataatttaaagttgctgctctgccccaagaggtctcctgcttgttcccactctctgctgtaggaaaactttttttttttttttgagtcagggtcttgctctgtcacccaggctggagtacagtgcgtgatgtaggctctctgcagccccaacctccccggctcaggcaatcctcctgcctcagactcccaaatcgctgagaccacaggcacataccaccacacctggctaattaaaaaaaaaatttcgtacagatggggttttgccatcttgcccaggctcgtctcgaactcctggcctcaagtgatccccccacctcagcctcccaaagttctggtgttaaaggtgtgagccaccgcgcctggcctgcaggaagatctttactcctcagcgtctcactccaacagagatccggctcccactctcaagctctccctgttcctctccccaccaggcgggtattatcattcccattttacagacgggaaaatcaaggctctatgacacctctttacaggcgtcataaggaacctgaggtccaggctggctctcccggaaagcccagagtacctggtatttgttggtggaattgaagggaatctcagccactttcttgttgcgttcacgcatcagcttcacggagccagaggacagctcgatgcacttgagcagggcagactcagacgcatccccagccacatccctctgcaaggagaaagggttgtcagaacagggacagctgaggggaggacacaggcagggccgaggtgaggccagtagctgaacccaccttgagcacagggatgttgtcctgaccacccttgaagacagcgcgattgcagagcccagcgatgtgagacagggccacccaggtgtgcgaactcttgtcaaatgaggtccctgggggaggcatgtgtgagggccagggactcctggagccaggcccccatggtcctcacccggggcctgcgctcacctgactggtcctcagtggtgtcagcctcgtggatctggttgtcaaaccacatgtgggcgactgtcatgcggttctgagtgagggtccctgtcttatctgagcagatggtggacgtggagcccagggtttctacagcctccaggttcttcaccaggcagttcttccgggccatgcgcttggcggtcagcgtcagacacacctggaggacgagcaagggcaggcaagttacagggacaagcccggcagcagggttggatgagcgacacgagggccacagcccagctgcccagcccccagagaatcctgagggcctggaaaagaatgaggcagcacccagcaatgccacccccaattcagaccaatagaaacagggcagagacacccaaagacagggactagaatgctcatagcagccacatgcataatagtgcaaaacagccaggtgcagtggctcacgcctgtaatcccagcactttgggaggccgaggtaggcgcatcacttgagatcaggagttcgagaccagcctggctaacatggtgaaaccccatccctactaaaaatacagaaattagcagggcatgatggtacactcctgtcatcccagctacttgggaagctgaggcacgagaaccccttgaacccaggaggtggaggttgcagtgatccgaaatcgtgacactgcactccagcctgggcaacagagtgagactccaactcaaaaaaaaaaaaaattgtccaaaactgcaaactactcaaatgtccactaacagcagaaaagataaattgtggacaatggaatactaacattgataaaaacaaatacattactgctgcctgcacctgcatgggtgaacgtcaaaaacatgttcagccaaaaagagccagaaatgagttcatactgaattattccgttaataggaagtttgaacacaggcaaagttaatctatgctgttagcagccagatcaggggttacccttgggttggggggcaggggctaaataaggtcttgagggggcttcagggagacgcagtctcgttgcagctgacgtgattctgttcagtttgccccaaatcatcagactatgtgctcacaatatgcttaatcctttgcgtataaaaatccatttgacatagggtagcattcaacattgctaatatggaaaacagtaaactttttttttttttgagacacagtcttgctctgtcgtccaggctggagtgcagtggctcgatctcagctcactgcaacctccacctcccaggttcaagcaattcttgtgcctcagcctcccaagtagctgggattacaggcgcccaccatcacgcctggctaatttttgtatttttagtagagatggggttttgccatgttggccaggctggtcttgaactcctgacctcaagtgatccacccacctcggattcccaaagtgctgggattacaggcgtgagccaccctgcccggccctaatatggaaaacttcacataaaacattaagtcaaagaatgaaagaggagaatggtatttctaagatagtccctgccatgcaccttgaagacagcatttagtcaatatgctcacagctgtcaggcggaacctcacagagaatggacttctggggtgaagctggcagcaaagcagccagagaaaaaatttttaaaaataataataataattattattattataataattattattattattattttcttgagatggagtctccctctgtcacacaggctagagtgcagtggttcaatcatggcccactacagcctcaacctcccgggtcagcctcccaaatagctggaactacagacatgtaccaccacgcctggctaatttaaaaaaatttttttttttttttttttttttttgagacagaatctcgcttttgtcgcccaggctggagtgaggtggcacgatctcggctcactgcaagctctgcctcctaggctcaagctattctcctgtctcagcctcctgagtagctgggattccaggcacccatcaccacgcctggctaatttttatacttttagtagagatggggttttgccatgttggccagtctggtctcgaactcctgacctcaggtgatccacccgcctcggcctcccaaagtcttgggactacaggcatgagccactgcgcccagccttcacattttttggtagagatgggttcttactatgttgtccaggcttgtctcaaactcctgacctcaagcagtcctcctgcctcagcctcccaaactgttgggattaaaggcgtgagccactgcgccaggcttattattttattttatttatttatttatttatttttgagatggagtttcactcttgtcacccaggctggagtgcaatggcgtgatcttggctcactgcaacctccgcctcccaggttcaagcgattctcctgcctcagcctcctgagtagctgggattacaggcatgtgccaccacgccccactaattttgtattttcagtagagacagggtttcaccatgttggccaggctagtcttgaactcctgacctcagctgatctgcccgccttggccccccaaagtgctgggattacagcgtgagccagtgcacccagcctcattattttattttttaacttgatgtactcttcaacttttcatcatgagcgtgcacttcttaattttgcaataggattgttggctctttacggcttgccagtgtttctcaagatttttgtttgtttctttctttgattgtttgctttgttaatgaggccctctgagtcaggcccaagttgtctttcacaagaatactgtgatccaggcccccagccccttctccggacccaggggtccagatcccagcccctcctcccccagacacacgggtccaggcctctagcccctcctccctcagactcaggggtccaggatcccagcccctcctccctcagacccaggagcccagacccccaggccctccccacccagacccaggagcctggccttacagtgacagtggccagcagaccctctgggacattggccacgatgatgccgatgaggaagatgacagcctcaagccaggtgtatccgagaatgagggagaggatgaagaaggagacacccaggaagacagccacgccggtgatgagctggatgaagtgctcaatctcgatggcgatgggcgtcttgcccacctccagccctgatgccagggtggcgatacggcccatgacagtgcggtcgcccgtggccaccaccacgccccgagccgtgcctgcaggccagaggggttaggctgaggtggggtggctcagggaggttctggaggcctgaccccctgggacacatccctgtgtctgccccagctgtgtgtcttctctgcacccgcctcaccttccacacagttggtggaaaagaaggtgatgttccgagtctccaaggggttgtcgtgagtgcagtcgggagagcgagtctggggctcggattcgccagtcagggaggagttgtccacctgggggtaggtgcagcagagagagggttcagtccagggcctgggacaggagggtatttgtgtacagggcttggggctgaagcctgtgtgcctggagatcacagctagaagcctgggtgcccagtgggtgagtggtgtgtgggaggccagaggctgggatcttgaaggtggggaaggcacagtgctgctggccaaggtctagggtccctaaggatctccgaaaggtgagggctgggcctggactcctgactgttgggtgaggaggtggcccagggcctaaactcctgggtctgagggaggagggcctgggggcctggactcctgggtctgagggaggaggggttgggacctggactcctgagtgtgagggaggaggggctgggcctgagctcctgggcagcccgagggagggtaaagccgggccctaggcccaggcccaccttgcagccgtgggctgagatgatccgcaggtcagctggcactcggtctccacccttgatctccaccaggtccccgaccaccacctcctcagcgttcacctgcatcttctcaccttcccggatcaccagggcttgctgaggtgggatggagtaatgtcacctcccagactccctctgcctgggggtcactgggcccggcccccagcccatacactaacacccccgtctggccccttgctgggcacccttcacctggggcaccatgttcttgaaggactccatgatcttggagctcttggcctcctggtagtaggagaagcagccagtgatgatcaccacggccgccagcacgatgcccaggtacagctgtggggagatgtggggatgttgatcaggggccgcccaagccactctccaccagtccctgctcgcctggagtctgggaagggagctttgtgtcagtgggggtctgtatttgtgtgtctgaccctaggttggttatgagggttggtgtgtctgagtctcccctgtttgtgcttgagtccctctttctgtaatggttgtgtttgaatctaagggtctgtcgattttttttttgagacagagtctcactctgtcgcccaggctggagtgcaatggcatgatcttggctcactgcaatctccgcctcctggttcaagcgatcctcctgcctcagcctcctgagtagctgggactacaggtgcatgccaccacacctggctaattttgtgtatttttagtagagatggggcttcaccatgttggctaggatggtcttgatctcctgaccttgtgatctatcaccttggcctcccaaagtgctgggattacaggtgtgagccatctttcctggcatttttttttttttttttttttgagacagggtctcgctctgctgcctaggatggagtacagtggcacaatctcagttcactgtagcctcaacctcccagattcaagcaatcctccctcctcagcctccggagtagctaggactacaggtgtgcgccaccaggcccggctatgttttgtgtttttttagaggctgggtctgtctgggtatgttactcaggctactggaactcctggtctcaagttaccctcctgccttggcctcccaaggtgctgggatgacaggcgtgagccaccatgcccgacttgtccatctgttttgtgtgtgtgtctgtcctcctgcacatgttgagtctgggatgcggctgtctgtccatgtgtctgtctgactggctgcatgcctgactttacattctacaaggcagcttctttggttctctgtgtgtggatctctgtctctgtgtctccagctctgcctctctgtgagagcttatgtctaagactgtttagatttgaacatctgaggacactctctgtgcctgactctcatgtctctctgtcaccaggttatgcctgcattgctgtgtgtgtgtgtgcgtgtcagtgtgtgtgtgagtttctctgtcagtgtatatctgagtctgtgtctgtgtttctgaattaggtggccatgtttgaaaccacatcctggtgtggcatctgcgttgaccctccgtgcacatgcgtgtgtgtgcacacacgcctacccaggtgagcagctctgtgtggctggtgtgtggtctgtgttatgcgcatgggatctgaggctgcatctcgaatgtgtccctgtgttatggggatgggccctgatgtatcagcagcggggtgtgcctgggtctctatgtgacactcactctgggtatctgtcaagccatgaccacctgctggtgtctgttctcaaggccgctgaggtcacacagccttgggacagagccccggctcacacatcctgctgtggggccttggacaagtagcctggcttttctgagcctcagtttgccttgtatttgatctggttctcttgctgggtgattgtgagttagatgggaaaaagggggagagtgggctgtgaaaagcttagagggatgggaagaagttggggtgcggtgtccgtaaataaatgtgcagagccttgcacagggcagggtccaggcactcacgttgtcaccagaggggtcgtcctcggtgcccgcctggataccgtaggccaggaagcagaggatagccccgatccacagcaggatggagaagcccccgaagagctgccggcaaaacttgacccactctggggtggtaggcggtggcgtgagtgcgttaggcccatcccgggccaggatctcctgggctttgctgtgggtcaaaccctgagggacagaggactcacacagaaccctccctgggcaaccctggcaccccaggccttcaccagacccccagaacttaagacaccagccacagcccctcctccctcagacccaggggtcctagcccccagctcctcctccctagttcccagggtcccagcccacagcctggccacacctgcacacagtctgtgttgtatttccggcagacctcttccactgacatcttgtgctctgtctgaggaacaggagtttgggggagacggtgagtgcctaggccagccaagaactggcgaggttctctgggagggtgtgcgggcagagggcgaggcttaccatagccacctccttcttgaggtcatccaggtcccggcgctccttgcccttgttcttcttgggtgagtccttgtcatctttcttgtcctgcgaggtggcgatacgatagctgtcagagccaccagactgcgggcgagaaggggttccaggaggacaccggccctccatgccccagctatcctcctggccggtgcccctgcatctctgggtggggggtctctgtctgcctctcggggtctccctgtgtctcccggagcctctgggtgacttcacctcccttctgcctctggtgactctcaggcctcgtgagtctcatctgctgcaatcagcttccctgtctctggttctgtgtgtctctgagtctctgtccccgaaggtccctgtctggcttctgcctgtgtttcagtctctctctgtttctgtgcccatctttgcggggctctccccttttgtgttctgtgtctatgtgactttgttttcgttttttgaaacaatgtctcactctgatgcccaggctggagtgcagcaatcacagctcactgcagcctcgacttctgaggctcaggtgatcctcccgcctccgcctcctgtgtagctgggactacaggtgtgtgccaccacgcccggctaatttttaatttttttctagaaatggggtctcactacactgcccaggctggtctctaactcctggactcaagcgatcctcctgctttagcctcccaaactgttgggattataggaataagccaccgtgccccacctctatgtgacattttaactctgcttctgtctcttcttccctctccctggccctgtccaaccttcctacatatctgtcttttttttttttttttttttgagacggagtctcgcttagtcgcctaggctggagtgcagtggcatgatctcagctcactgcaagctccgcctcccaggttcacgccattctcctgcctcagcctcccgagtagctgggactacaggcgcccgccactacgcccggctcatttttttgtatttttagtagagacagggtttcactgtgttagccaggatggtcgcaatctcctgacctcgtgatccgcccgtctcggcctcccaaagtgctgggattacaggcgtgagccaccgtgcccggcctcgtatctgtcttttctatgtctccacgtgtatctccatctctttctcctctgtctgtctcccttgatgtgtatctccaggtctgtttttggctcttggtcttattgctttgtttcatcatctctctgtctcctgtctctttatctctccatctctgtatctctgtctttgcaaggctgtttctctctcttgatagctctctctctctctctatcgctctgatctctttatgttgtctctgtcattctctatcctgatcccagtctctgggtctctctgcatgtgtctttctatgattttgtctctctctgatctctggttctttgtctctctgccttgcatgatgtctgtctccatctcttggctgtgtctccccaggtctggctgagtttctgtctctctgggttcttatttccctctgagttggcgtctcaaggatcagtactttctgtctctgtctttttccgtctttcggtctgtctctctctgtcattgtgtctctatcttcatctctcaagctgtctcctctgggatgctcacatctctccctacctgtctcttttcctgtttcaacctctctctgtctctctctctgtctctctaatatctctctctgggatctgcctatctctgtctctctcccactctctctctctgggatctcctctctatctctgaatctctctttctctctcactatcactaagatctcctctctttctctttctctctctctctctccctctctctgtctctctcaaatcttccgtccccctccttccccatatatctctcattctctttctctctctccctctctctgtctctctcaaatcttccgtccccctccttccccatatatctctcattctctttctctctctccctctctctgtctctctcaaatcttccgtccccctccttccccatatatctctcattctctttctctctcttactacctcatcctggaattttcctctctgtctctctttctcccactgtctctctctgggctctcctcaatctctctctctctttctctctctctctgtccatatatatatatatatatatctgtctctttttgtaggatcttcctctctctttcgctgtctgtctctgggatcttcctctctctctctgtctctttctctcactttctctctgggatcttattctctatttctgtctctctgagatctcctctctctgtctctggaatctgcctctctatctctgtctatgtctctctgtctctgtctctctcactgtctccctctggtaccttcctctatctctgtctctgcctctctctgggatcttccatgtgttgggcccatggagcgtccttaacagaggctgggcatggccaggttcctggaggacagagcaggagagttagaggcagaagccctagtcctggcttgaactgcgcatggtgtgagtccctgaagttccagtttgggagcctgggcggatggggagggcagtgtccgaggctggtgggaggggtggggcgaggctgggtgctgcaggggccgctgacaggtcccgcaggcccagggccaagctgggatcggaggctcagcgcggctcagcgctaatctcctcgtgaccttgtagagggcctgagctgcctgctgtctgcccccagacccagaggctgagtcggagggtgggggtgtgcagggaggggcagcagcctggagatctgggagcctcaagaaggggtgcagggggtgggagggaggcttggccccacgccagccctgcagcagcactgcgtctcagatgcggaggcacagaggcttgggggacggggagaccatctttcctactgccctacagtgccggggtggtctcagctttgcccgatggggtagacccaggatggagagacatggagagatggagagatgtggagctacaaaggcctggggtcaagtcctgtgcaggaggccaggagaggggtgagatgggggtcaggagagagagagggagaaaatcagctgcccacccagaaaccttagttgaaggctgggagctgatgctcggggccccataaatgctaagggctgggccggactctcagatactgagagaggctggggtcctggatccctgggtctgagggaggaggggcaggggtctggacccctgggtctgagggaggaaggactgggagcctggaatcctgggtctgagggaggaggggccagggcctggactcctgggtctgagggaggaggggctggggctggacccttgggtctgagggaggaggggctgggcctggacccctgggtctgagggaggaggggctggggcctggattcctggtctgagggaagaggggctggggcctggactcctggatctgagggaggaggggctggggcctggactcctggatctgagggaggaggggctggggcctggactcctggtctgagggaggaggggctggggcctggactcctggtctgagggaagaggggctggggcctggactcctggatctgagggaggaggggctggggcctggactcctggtctgagggaggagggaccgggaccctgggactcctggctcaccctggccctggccttggctcctgcttgcccttgacacagccagacccccttggggagcaggctcccatctgttggagtgcacagctgaggctttcccagtcaaggcaggaggcccagatgggcgcgctgcggggtgggagcacctccaagggtggggaccatgcctgtctcgctgtggccgcctctgcagctccttgccattttccatgctgtccgcctctccctgatctggtgccagctcccgcagcctctgcgcctgggccggcctcccttccccctcgcaggggacctggcccacatctctgaccatccctcccttgacctccccctttgccctctgcctcctcttcctgtccctcaggctgactgtggttgccgctagataggaaatatctgtccttgtgtctcttcctctgagcctcagtttctcattttctctctcaatgtctctccatgtgtctcagccatgtctctctgcttgtctctgtctctttgtctctatgtccatgtctctttctctgtctctttcagagcatctctgtctttccatgtgtctctgtctttccttcccatgtctaagctgccttcatttctcctctcgtccccactccgtttcctaagaccacctccctctaacttccttctctagggcttttagcatcagtcttctcccaatccatccacagcttccctccctccatcccacttacctgacagccatcactgactacccctttctcccttctctcccctagtcctgccccaacccaatcctccttcccagccccccggcccaccctgccccaccccacagatctgcagccccatcccccacctccatccctgggcccatcagcctttatccgccatctttctccccagccctcctattctccctccactggcctctcccgccctcttcatcccacctacccccacccaccccctcctctcctgattccccctcccttcagccccgccccagacacacagggaggaatccagggctgcagcaagggtcaggtggtcagccagggagggaggcggcatctgctggagagactcacagacagacaaggacacacggacacagaggcaaggacacagccaggcatgcacgctccccactacacagttgcacacgcacaccctcagctgtgcactcagtctccccaccgtggctctcctgttcctctcctcctcccagcctcccatgcctgctcccctacatgaggggctgcacacacacacactgcagccccaggctgcgacactgcggagcctgcacacacacacacacacacacacacacacacacacacacacacacacactgcggagtccccccatccaggcctggaaggagaaagagaggtcatctggtgtccatcccacaacgtggacctatccgcaccctgccagggaagcaggggggcctcaataaccccagacgcactaacacgagctctcacagacacacccagacgcgatcgcagactttcagacaccacggggcccacacactcgctgccagggcctgacagagccagcagctctcatacgcacatgcaactgtgcacatgcaaccgcacaaggtcaggcggagatgctgagggctggcccacaacctcgcggatctccgcacacaaagccatgccaacgtgcgccacagaccccccgccgccccctgcggccccacgaccacatggattggctgggtcagccggctccccgggtctcgcaggcctggccccggagcgcaggggtcccggtgcccccgccccccgcgcacacccaatgtcaccggccccacaatgtcacacggaagcggcgcccagccggctcagcacctacccccatcttggcggctccgcggcgagagagccaggcgggcggggcggggacctcggggcgggctcaggctcaggcttgggctgggagcctctgcagcgcccgcgcctcggtaggtgcgcgcgtccgtccgtccgtccgttggtcccaccgcacagaggctgcggcggccgccgcctccgcctcctcatatgcccgcgtccgcgggaggggggcggcgctggccaatcaggggcgccgccgtgctgacggacggcccgcggccccgcccctggtactgcagctgtcctccccttgggctccgcaaagtggcggcgcggccgcgaagggggagcgctgcgggggtggggggattcccagagacctccgcaataggggacttggagaccccctcaatatggagtagggcctccaagaaggggcgctcagggaaagaaaaccccggaaatcctctcattgtgggggtgtgccatcaccgagaagggtacgctgggggagggggggcgggtagtgacacggggtgggagggaagcccggtgaatcactgcagtgtggcaccagggaccctggagacggcggggggtagtgctgttcagggagagggccctgcaggaggggaagttggaagggaacacaagagagcaagaaaggccttgcaattgaggaggggtgctggcgggaggagccctgagattccctcactgtgggtgcccccccactacgcctgagctatccaatgagccacaaccacacagggtacacgggagacacaacacggtggaggatggccccaggaggcccagaaaatgcccagcgtcacagttacacaggaccatcacactgatagcccagatgctggggacacgcacacaccacagggttgcactcatattccaccataggccagcatgtaccctcacacacacaacaccaccccaccacacacagagtctcaaacatagagtgaaacacacatagggcacacaccttacacacccatcacaccacaagagactcataatcacagccacaaagtgctgtgcggactaacaccgacactcagaaaatcgcagactcacacatcacacactctaccacacctgacctcccaccatctcacatagaaacccacatcgtgcaacccataaaccaacacacacctgcactcagcaccatcacacacgcacaggcctcacactgcctccagacacactacatcagcctttgtggacatcgttgcatgatcccacgatgtcgcacacatcctcacacacactgctccccagtgtgtttgggcatgagcaacggcccacagtgcaaagttgccaatgctaactgtgaatgacagacaaaaaggtgcacacacttacacatagcacaataattcaaacacaagtcacgcgacacccacacacctcccacacatacacacatcacgttattgcagcactatcgcagacatctttgttgcacctccaaacacaccccaacgccctcacccacatgacacacagagctcgtcacagtatatgtacacacacagatgcacagccggcacccacaccccaggcctgctgccgacacacaacaccccatcagccaccccactggagcccaagaagttgaggcctccccactcactccaacaccactttgttctatgaggaacaccccagactctccctggggatggtagaaggggaagagagagagagagagacagagagcatttgaccttgtagttttctcagaatgtgggtatcctctccacctatgggataggagatgtgggggacgcaggcaagggacagggagtgagcttggtgtatgagggtgggtgggtgaaggtcgaggacctggtgcagggaaatgtgtgaaaggctgaaggccagagagaggcacagaaacacagagattcagagccacagcatatggacagagacaaggccagagagtgaatggaggctttccccagtgcccagagccccatcccaatcctgtcctctgacccgtccccatctttctcgctgtcctttgttgccatggtaacagggagctgcttctgcagcaaaggaggttgggcctgcagactgggctgttgccatggagactgggaaagggggaggagccacatcttttaacccagatgcctcacccccagacgccccctccccaactctgccctcttcctaggggagggagagcctatcaacatatcctcctttccttctcttgacaccttggcctagaggcatgggcctggaccatggagaatgggactggggagatggggaagcctggggaggtgggggaggcctggattccaggagattctaggctctgtctgctcttgctctccagctgggccgggggaggccttgagcccttcccatcccacctcagacacaagctcacgtcccccctcatgcactctctcctcaggcacgagcctgatgagactgatgactgtgcatcgtgctcctggtgaggctctgcagaagtagggggggcggtgagaaggaaagacctgggaaggtcacagggataaaggggaataggggagctagatgtgagaggcggaaggagagacacagagggagaaacaggcagcccagaaccagagagaggcggatacaaacagattgaaaaagacagacagagattggcagatgcagagatgagaacacggagacagagcaacggaagagttcagtgaaggtgacagagacagagagacgtagacagccaggcagagacaggcttggtaaaccagggagactcagagataaaggccagggggagactgagcagaaacctggtaggggaccggggactcagaaatgggggagaccccagagggaattggcctcgaggcattgggacagagaagggggagaaaccagaaatgtctgtaatcatgttctagtcacctcgacaaagagtccgacccaagggcagagacattgattggagtgtgtaagagacgtggagatagagatgcgagacaacagagagaggctggtgcctgcccccacacctgtccgaggggcacgcaaccagggtctgagacgcagaaggggacgggtggcgacggggggcgctgtgtgcggggaggggtctcccagggtgtggccggcctgccaggactgcgctgggcaggcgggccctggagggaagtcgggcgctctgggctcaggctggccaactgggtgctgaacggacagctcccaagccccgggccgccgcccaggaacgggcgcagcctcgctctctctgggacctttccagtcaggctttcctttccgttccagtcccctccaggttccatttagttttttatggcttcctgtctctcaccccaactccgggtgtatcttaccctcccgcttcacctctggtctcagccctctattctttctccagtcttctctcacctcacccagcctctctccctgtctcgccggctctgtgtcctctagctctctctccccatccccctcccgcccactctgcccccttcgttgtctctccccatctctgtctctcgccatccctccatctctccctttctgctcggcctcgttttggctcttgctgtgtgaccttcactcgtccttcctcagctgcagtttccacagaaacctccggcggggcagggagggcggggacagaaggcggacccacctttctcctgcgccatcagcccttcagcctctcccacccctgcccgcccacccaccccccagtctactgggattcctcacttcctctcttgggggttggggaggtacattttcaacagaaacacgggatcacagccacagacagttgaagatggcctcgcagatgcgtgcacacacgatcacaacgtcactgaatcaccccggcccaggcacacactcgccaccccaggcacggccacactcaacagctcactggccctcccctcccccagccccatctgttttctgtctttctgtgtctccgcttccggtgtctccgcgtctccagatccctgcatctctccatctgtctcagggtctctgtcgcagcctccctctgtcctgagagaaggtcagtggagaggggccagctgctgggacccgggctggcctgcagcctgtaggcagggctgagggtggagagagcatggaagtaaccatcgaggctcactctgattctcagcaggtgccccggggacccaagcctccaaagccctcacacccccaggaaatgagagacggtatccccagttctggggttttgttcttttttttattccaacaggggctgcgatgtggcaaggggagggatgggggcccaactgaccccctccctgggggaggtctcatagaaattccgaggtttctccccccaaaaaagagaggaagagaagagtggaggggcaccaggggacacccatctgtccagaggccctccccacctccagaagcgtggggggctgcgtcaagtcttggggagcctgagcagtcccagaatggggtcctctccgctgactgctttccgcttcccagagccgcccccgaagtccccagcccctggagtcctcggttcctgcgcccttctcgcccgcggcaccctctcgcgagtccactggggggcgcaggcgggctccagagccaggcctcggacttcgcggggaaccaaaggcaaaatcgcggcgtccggggcgccggcgcacaagtcctgtcccgcgcccgctgcgggagcggagactgctggggcctggggcgggccccgtcccttcggtcagtccgggcgcccgcacagccccgcccgtggtcactcgtgctccgccagctcccgggggccggcggggccaggccgcggccggggcgggctggtggcttcggcggggacgcccaggccacgcggaggcgcgccggcccccgaggcccgcagcgcctggatgcgccggcactcctggcagacgcgcacgtgggtgcagggggtgggggcggcgggtcgggctccgctggggggccccgggtcgtccaggaggcgctgcgggcccccgtgcgcgctgcccgcatccccgcccgcgccggccgagtagagcttgccgttgctgaggcgcatctcgcggaccgcgcgcagtgacagcagggcccggctcgggccgcccgggcgtcggcgccggcgggaacgcgacgtcttgcggcaagaaacggcgtggcgcagctcctgcagcatctcctggcacaccgacacctgggggtggcgcgggcggtcaccgtcccggcgcagtccgcctcccgcctcccccagcccctctccacatcccactcctcctcctcctttcctcgcccgggtctttcttccttctgccctcgcttcccttcccacttctcttccctttatctcccccgtgttttctgcctcccctctccacctctccccacttatcttcaatgtctccattctactctgcgtttgttcctgaatctgcccttcaccttccacctaagctcctctctttcctctggtcttttcactgtctctaaattttctccagttcttccttcctgatttcccatcttctgcccctcatccatgcgttcattattgcaaggcatatttacctgtggcctgctgtgtgcccggcactgttctgagcactggggatatggcagagaaggaaacagacagaagtcccagccctcgtggaggttatgctcaagtgtgcagagacagaagataacagacatgtatgtagtgtgttaggcgtggtgagtgctttggaaagaaagaaaatcgggaagaggcctaaggtgtatgggtagggagtgacgatgaattctgagacaggacagtcaaggaagacctcactgagagaaggatccttaaataaagacagggtgagccactggagacctgggaagccagcctgctggacagataaccgggcagggccgaaatgcccaggtgggagtgacttggcacgtctgaggcactgcaagcaggtcagcatggctggaggggggcgtgcacagggaagacagaaaaatgaggtcaaaggagcagtggcggccagctctggtaaggcccataaaccactggaaggatttttggctttcattctgaaaatcagaatgagagtcagacgggaatcactggggagctttaggtagaggagtgctgtgttttcataggatcactctgtgttgagaacagattgtagggaggccaaggcaagagcagggagctcatggaggaagctatgacaataacccgggcaggagatagggatggctggaccagagcgacctgagaaaggtctggattctggatatattctgaaggtggagccaataggatctgctaagagatcagatacggggcatggaagagagagaatagtgaaagaaagctccaatattttggcccgagcaactggaaggaccaaattgcctcacaggtgggcagaagcccaatgttggacacatcgcatcacgtgcacacctatcagatatccaagtggagataccaagtgtggagctgaagttgcagaccttggcttcaggggagacacatatttgtgggttaaggcaggcagccttcaagatcccacctcccgcgtccacgcccctgtgtaatcccctctgacactgtgtcagagctggtctgtgtgaccaacagaataagtttcagccattgcacattctgcttccgccttgctctctctgatcactcgccctgggggatctcagctgccatggtgtgaggacactcaagcagtccttggagaggtccttgtctgaggaactgaggcctcctgccaactgccatgtgagtgtattcatcatgttttttattttctgtgtcttaggatgttttgacactttaaacatcttgcaggctggggagagactacccctcccagaactagccaagccttagagatagcagagggctcagctgcctttcatgtgcaaaccaaccaatctatacccccaacctccccctttacctaactctcacataccaagccaatattcttcctgacctaaatcaacccggggccaggtaccagataagtagggacagcccctatagcccagagtccactgacattatccaaactggtgaatcgtaagctgtttccccttctcctgggaaatgttaaagaataaaaatcatttttctttctgtttctttttgagacagtctcactctgtcacccaggctggagggcagtggtgcaatctcggctcactgcaacctccacctcccagattcaagtaattctcctgtctcagcctcctgagtagttgggactacaggtgtccaccaccatatctggctaatttttgtgttttcagtagagacagggtttcaccatgttggccatgctggtcttgaactcctggcctcatgtgatctgccctcctcagcctcccaaagtgcttggattacaggcgtgagccaccacacctgggcaaaaatcatctttcaatgaaattggtctccatgttgtcacttggccacctccagaaactaaaatcccatggggacatttgggacagtgagccatcttagaacggaaccctccaccctttgttgagccttcagaccacagcagtctggccaaaaaacatgactatgacctcatcagagacccatggcagccagaaacatccagctaagctgctccgaggctctggacccacagaaactgtgaaccaatggaagctggctttttaaaagctgttaaggtcatttgttatgatagcaatagataactaacacaagaatcaccagcacatagtgggtcttaagagccatttggctggtgggatcattcaagtagtggagaaagaccgagaagagaagcagtctaaggactgagccctggagccccacaacaaacagagcctggggagaaagagaaacccaacgagggagcctgggaaggagtgaccggagaagtgggagaaggggaagaaggggctttgaggattgagagtgactggctgtgccgaagcccactgctacctcatatacatgaggcctgagaccgggaatttcagacatggaagttgctggtgacaagagtggcttcagtggagtggcagggaccgatgccagactggagtggggggcaagaggaaatgggaggaaagaagaaactggaagcatcagggagaccccccactgctgccaaggctgtaaagagaagggaagaaagtgggcggtggctgggagggaaagtgaggtcaggagagggtttaagactggagaaatgacagcatatttgtacgttggtggcctgaatccaataaagagaggacaactgatgctgcaggaggaaaggacagacttgccggagggatgtccttgagaaggcaacctggacacgggtggagggcacctttactagcagcatggacggctccttcagaggagtccttgggccaagtgcagaacactggcaggcagctggatgcagagctggggtctggggagtagatgtaaggtcagccgctggatgtgaggagggggaggaagggctggaggctgacagagagaggggaagcagggaaccagcagtccaggggtgcaagagcacgaatgggtctggaaatgcaggggtgtggctgggcggcccccagggacatggaagcagccctcctgaacacagtgtgggaccagtccagggctgtgtcctcttctggttccctctgtcacccaggctggagtgcagtggtgcaatctcagcttactgcaatctccacctcccgggttcaagcgatcctcccatctcagcctcccgagtagctgggattacaggtgtgcaccaccatgcccggctaatttttgtatttttagtagagatggggtttcaccatgttggccaggctgatcttgaactcctgacctcaggtgatccgccagcctcggcctcccaaagtgctgggattacaggtgtgagccactgcacttggccctgtttctcttcttatttcttcttgcttttctgcctctgtggctccccacatcctgtccctcacctcctctccctgcatcctcattgctccctgtgcctactttccctcctgttcttcctcacgcgctgattctctggccccatcagctctcttacttccccacctcctgcattcctctgcccccttctcgcgatccccaccaccctccaggtatggctcccaatgccacaatcttcacgcacctcagcccctgggggtccctgttcctgcccacccccacccccagcctcctcacctcctcggactcagctgacctccgtgtggaccatatgaattccatgaccgccacgaagacagcaatgatgaggccacagatgagcacgataaaaatgccaccaatgttctccatgcccaaacctggagggcgaagggagttggggggcaaagggagttggggctgtgtgggaagggggctgggagggggctatgggaaggggacaccatacgcgggaactgacctttagctcgatggtcctcctccttggggcaccggcccccctcccaccacttgcgcttcaggatctccagccggttgttctcctgaagctgcaggatggccagtgtgatctcatcccggaacggggagcctgggcaggcacacgaggggctggaccagccatcgggccctgcagccctgaccgccccaaaccccaaactgtgccctcaccacggccttcccccgcctctaccacgtgcccagggtcttccctgcagcctctcctcacccccagcccagtctcctctcaacacagcagccagagagacagtgttaggaagagtcagaggccatacctttcctgtgctcaggactctccatggcttcctgttgcaagctcctcccctcggccactctcagacaccctcacccccacggctctcagctccagcctcatcagcctcctggctgctccccaaattcatcacacacagtcctgtcttaggacctttgcctctgcctggaatgtccctctccgcacttcatccaggtctctgcccacatgctggctccccagggagtctattctgatgactttatttaaaatggcaccaagcgccccactccctgtcagtgtcttccctttaatttactttggagcagctgtcaccacctaacactgtattatatggctatgtgtttatcatctttcgtctgcatccagtgcgggacttggcatgcagttggacaccagacgaatccccatccacacctctccctggaccacctctcctccccaacctcacatcctgcccttaagccatccttgggcttcaacaccccacacaccctattctatacttatttcttcattgactaagatacttcccgaccaactaccacagaaccagagacacgggcagatgaaagtgattaatatctaccaggcaccaactgtgtgccagaccctgggtttattcaggtcttatgatgatcctgtgggacaggtatcccacctgaggcaagtgtttctgaatgacgaaagtgatacacttgcttaagactgtgcactgagtcagggaggaaactgagatttcttcctttcttttgacagaatctcacttggttacccaggctggcatacagtggcatgatcattgttcactgccacctccacttcctgggctcaagcgatcctcctacttcagcctgtagctgagactacaggtgcataccacacctggctaattttttaattttttgtaaagacagggtcttgctatattgcccaagctggtctcaaaactcttaggttcaagtgatccttccggcttggcctcccaaagcactggaatcataggcataaaccacagtggccagccggaactgggatttgaatccaggtcggtgtgactcctgagcctgtcctccaagcaccaagctacactgcctccctggcaccgactcacctacaaagctgctaagatctggggcaatttgctatgcagtaatagataactaatacaggtgtcatcagtacataaatgattttaaaagccaaaatgccaaaatttggtgacaatttggtcgtgagttccaccactgagtcctggaaaaacatgtcctgggccatgcgaggtggctcatacctgtaatcccaacactttgggaggccaaggcgggcgacagagcaagactccgtctcaaaaaaaaaaaaaaaaaaaacaaaacaccaaacttgtcctgaaatataaataggcacatacaagtctccctaccagatcattccatccttcccatccatcttacaagcatttttcaagcacctgctctgagccaggctataggatttttccaagaaataggaaacaagaccaggtcctcacccccacagggcccttgggggaagacagcaagccccaccacccacatatactgaattgtatacacagtctcactgaattctcccaacagctctgggagggctggattgctgctaggcctggttttgcaggttgggggtacagaggctcaggacggtgatgtcgcctgcccaagaccatacagccaggaggccacatgcaacacacccagcctgcctcgggggtgcctggcccggtcctgggcctgctcacaggtggttttggatgcccacggccctgctgtgttccacaccgtgctgtgccgtacccagcggcatgccaatgccgtagcccttggtgtcgaggagtcccccgatctgggtgaggttgcagttgaggcgccggtggtattcgttcatggtggactcgagcaggaaggcgtagcgggagttgaggacgcgggcaatgccctcttctgtgctcttgacgaacacgctgggctgcttcgactgcatgtagttccacatgcgctggtacgtttggtaccgtgaattctgggcaggaggatcacaaggggaagatgggagggtctttccagccgcttcctttccccgagcccttcccatcctccaggaagtctccctcaacccaggagaatgcaaggtgatcaaaggaagacagagccaaaggtagaggagagagaggagatggacaaactgtccaggccaggtccaagtcatccccacagccactgtgcccaccacccacctggggggcccggtgagtgcacctccacctccttccccttaaccctccagccggtggccgctgcccaactcaggcctcctttagaccactaggacctccctgccaagcttgctttcctcttctttccttcccaccaccccaaaatacaaaagatcaagcacttttcaccttgaagggccttcccttctctctgtcagcccatattcctggtcccgacccttccagcagcctccttgatcccatttggcccatatgacattgacatttgataccacatatgcctccctgccctcattccccagttccctagccagccagctgcgagccccatgacagcacatgtgtgttttctgctccccagcctccaggctgtcactgacaatcagtccctctgacccaggagaccctgcccagacccatcctgagctgctttgcatggcagggatcccaacaccacgcctgagaggttctggtggccccacctggaagaaggtcatggtggagccggcgtggatggtgccatactcgatgttggtctgatctgccaggtcatcggccgactccacaggcacctccatgcgctgcacggtgaggaaggcggccaggttggccgtgtaggaggagatgatgatcaaggtgaaggcccacctgaagggtgggaggggtgagtcacgggctggagtcacccctgctgacctgcccccgtggccatgccccccattggtggtgcccctcccaagtgaccccagcatctggaagactcagtgactgctgggtgcagaagcggggagtgtggattctgaagccagacttcctggttgtaaatattgcatccggagacttctacttccagatataaaagagtaagatggtctggaaataccctcccaccataaacagctaaagagctggatagaatacaggaaacttttttcttttttttttttttttgagacagatcttgctttgtcagccaggatggagtgcagtggcacgatctcagctcactgcaacctctacctttggggttcaagtgattctcctgcctcagcctcccaagtagctgagattacaggtgcccaccatcacgcccggctaatttttgtatttttagcagagacggggtttcaccatgttggccaggctggtctcgaactcctgacctcaggtgatccacctgcctcagcctcccaaagtgctgggattacaggagtgagcgaccacgcccggccaggaaactatttaaaacataggacaagagacatcatagaactgtgatccctgagaagagaaacaaaatgagtcttattgtccaggctgcttggctggatttaatttataggaagggaagcccaaacagcccagcaatcctgctgagttgcagagacggagactggtgatcaggcaggccaacatggctggaatttgggggatagagtgcctgagaggagggagctgcaaagagagggaggattcagaaaccggtggtccccttgagtctttggctgaatatcaatctgtgcatgcatggggtgaaactctgtggggctggacaagagcaactttcaaggagaaaacaattcttagagttgacacagggctgagagtcttttgagctccctgcagccagagtagaaagatttcattgaatacatgagacattcagtagagacccaaaagtgtaacatactagaaataggattaagttagccctagaataaaggcaatgctaaagctgcactaaaaaagcttaaaaacaggcctagaagtatcaaagtaattcacaagtaacctaactagattccagaaaaagtttataaatactctgtaaaaaaatatattcagcaatgtaaacaatgtctgttatgtaatttttttttttttcttgagacagagtctcactctgtcacccaggctggagtgcagtggtgtgatcttggccactcccgggttcaagtgattctcccgcctcagcttcctgagtagttgggattacaggcacctgccagcacgcctgactaatgtttgtatttttagtagagatgaggtttcaccacgttggcaggttggccttgaactcctgacctcaggtgacctgcccacctcgcccacccaaggtgctgggattacaggcatgagccactgtgcccggcctattacataattttttaaaaaaataccaggttgggcacggtggctcacacctgtaatcccagcattttaggaggctgaggtgggcggattgcttgaggccaggagttcaaggacaacctggccaacatggcaataccccgtctctactaaaaatacaaaaattagctgggtgtgatagcacacgcctgtgatcccagctacttgggaggctgaggcacgagaatcgttggaatccaggaggtggaggtcgcagtgaaccgagatcaccactgcactctggcctgggcaacaaagcaagactcttgcctcaaaaaaaaaggaccaggtaaacaaaggtgcaggaaaatgtgacctataaccaagagaaaaatcactcaattgaaacagacccagaattgacatagatgatgacggaattagcagacaaggacatgaaaacagctattataaatacattcagaatgctcaagagtataaagaaaaacatgaacgtaatgaaaggaacagaagatataaaaagaagtgaacagaacttttagagaatgatatacacatatctgaaagaaaaattttactgaaagggattacacagattagacaccggcagcagaaaagatgagggaatttgggccaggcacagtagctcatgcctgtaatcctagcacactgggaggccgaggcaggaggatcacttgaggctgggactttgagataagcctggtcaacatagccagaccctgtctctacagaaaaataaaaaaattagatgggtgtggtggtgcctgcctacagtcccagcaacttgagaggctgaggtgggaggatcacttgaggccagaagtttaagtctacactgagcctggtcgtcactgcactctagtctgaatgactaagtgagaccttatcgttatttttttattttatttatttatttatttttgagatagagtctcgctctgtcccaagctgaagctggagtgcaatggcgcgatctcgactcactgcaacctccgcttcccgggttcaagcgattctcctgcctcagcctcctgaatagctgggattacaggcacccgccaccatgcccagataatttttgtattttttgtagagatggggttttgccacgttggccaggctgagaccttatctttaaaaaaaaaaaaaaaggctgggcgcggtggctcacgcctgtaatcccagcactttgggaggccaaggagggaggataacctgagttcaggagtttgcgaccagcctgactaacatggcgaaaacccttctctactagaaatacaaaaattagccaagtgtggtggtgcatgcctgtaatcccagttactcaggaggctgaggcaggagaattgcctgaacctgggaggtagaggttgcagtgagctcagattgtgccaccgcactccagcctgggcaacagagtaagactttgtctcaaaaaaaaaaaaaaaaaagccaggcacagtggctcaggcctgtaattctagcactttcggaggccgatgggggcggattgcctgagctcaggggttctagaccagcctgaccaacatggagaaaccccatctctactaaaaatacaaaattagccgagcatggtggtgcacgcctgtaatcccagctacttgggaggctgagacaggacaactgcttgatcccaggaggtggaggttgctgtgagctgagatcacgccactgcactccagcctgggcaacaagagtggaactccatctcaaaaaaaaaaaaaaaaagattagagaatttgaagaactgcaatagaatctatccaaaataaagcacagaaaggaaaaagtgatgaaaatgagcacagagcctcaatggcctgagaaataagtggctttacctatgtgactggagttccagaaagagaggagagaaagggataaccaaaaaaaagtctgatgaagtaatggcctacaacttttcaaatttgatgaaaaccataaacttgcagatgtaagctccataaaccccaggtaggctaaacacacatatttataaaacgcaccaagacacattataatcaattgctgaaaaccagcaataaagagaaacatcttaaaagcagctagaaggggggaaacatattacattcagagaatcaaagataacagtgccagtcgacttcttgtcagagagtgtgcaagcccaaagatgatgcaacatgctgaaagaaaaatcaaaacaaactgtcaacctagaattccacagcaggcaaaaatatccctcaaagaagacacactaacacatttttcatacaaaaccaaagctgggagaattaattgccagcagacccgcacagcaagaaatattaaaggaagttctgcaggtaaaagaaacacaacaccagatagaaacgtggatgtaccagaaggggtgaagggcaccctcttcaaatggtagatttgtgggtaaatagaaaagatatattcctcactttcaaatttccttacgaagcatttagtggtttggttttgtttttgagacagggtcctgctctagggtggagaggcgtgaacacagctcactgcagcctcaacctcctggacccaagcaattctcccacctcagcctcccacggagctgggaccacaggcatgcatcaccatgcctggctaatgtttcttagtttttgtagagatgaggtctcgctatgttggccaggctggtgttggacgcctgggttcaaggaatcctccagcctcggcctcccaaagtgttgggattacaggcgtgagcaccacacccagcatttactatctaacacacacacacacacacacacacacccctaatgtattgtggggttcataagatatgcagagctcaaaggacgggagggtgagaggaacatatcatgttgtcaaggtcttatatcttacgtgaaatggtataatgttacttgaaagtattttgtggctgggtgcggtggtttacgcctgtaatcccagcactttgggaggccgaggcaggaggatcacgaggtcaggagatcgagaccatcctggctaacatggtgaaaccccgtctctactaaaaatacaaaaaaattagccaggcgtggtagcgggcgcctgtggtcccagctactcgggaggctgaggcagaagaatggcatgaacccgggaggcggagcttgcagtgagccgagatcgcgccactgcactccagcctgggggacagagcgagactccgtctcaaaaaaaaaaaaaaaaagtattttgtaataaattaaagatccatattgcaaacccagaaaaccactaagaaaaataaaacaaagaagtacagttaacaagtcaagagtagagataagcagaatcttgaaaatcccaacaggccaggcacagtggctcacgctgtaattccatcactttgggaggccaaggtgggcaaattgcttgagctcaggagtttgagaccagcctgggcaatgaagtgagatccggtctctacaaaaaatttaaaaaattagctgggcatggtagagcgcacctatggtcctagctacacaggaggctgaggcaggaggatggcttgagcccaggagtcgtgttcgtgccactgcactccagcgtgggtgacagagtgagaccctgtctcaaaaagaaaagaaaagaaaagtcccagtaaccccctaaaggtagaaaaagaggaaaaggggaacaaagaacagatgggacaaatagcaggttggtagatttaaacctaaccatatcagtaattacattaagggtaattggtttgaaccagcggctggctaactatggcccacaggccaaatctgacctgctgtctatttttgtacagccccataagctaagaatggcttttacatatacatatatgtatatgtatatatacatgtatgtgtatgtatgtatgtatgtatgtatgtatgtatttatttatttggagacagagtctctctctgttgcccaggttggagtgcagtggcacgatctcagcttactgcaacctctgcctcccaggttcaagcaattctcctgcctcagcctcccgagtagctggaactacaggcgcacactgccacgcctggctaattttttgtattttagtagagatggggtttcaccttgttgcccaggtaggtctagaacccctgagctcaggcaatccgcccgcatcggcctcccaaagtgctaggattacaggcatgagccaccacgcccggccagttttcacatttttaaatggttaaaatgaaatcagaagaacaggctgggcgcagtggttcacacctataatccgagcactttgggaggccaaggtgggtggatcgcttgagcccaggaattgagactagcctgggcaacatggcgaaaccctatctctacaaaaagttagccagactgggtggcacgtgcctgtggttccagctactcaagaggctgaggtgggaggattccttaagcctgggaggttgaggctgcagtgagccaagattgtaccactgtactccagcctgggcaacagagtgagatattgcctcaaaaaaaaaaaaaaggaatattttatgacacatgacttatataaaattcaaatttcagtgtcagtatccataaataaagttttattggaacacagccacactcattcatttaatgtatcatctacaacagcttctatactacaatggaagattgagtagctggaacaaagaccatatgatcaacaaagtacaaaatatttacttagggccagagcagtggctcatgcctgtaatcgcggcactttgggaggctgaggcaggaagatcgcttgaggccaggagttcaagaccagcctgggcaacaaagtaagaactctctacaaaaaaaaaaaaatgaaaataataaaaaattagccaggcacgtagtcctagctactcagtaggcggaggcaggaagatcccttgagcccaggagtttgaggctgtagggagctataaacacacagcactccagcctagagacagagcaagatcctgtctttaaaaaaataaaaataaagataaatatttaaaaacatctttttttttctttttttcttttctttttttttttttttttttgagatggagtcttgctctgtcgcccaggctggaatgcagtggggcgatctcggctcactgcaagctccgcctcccaggttcgcgccattctcctgcctcagcctccggagtagctgggactacaggcacccgccaccgcacccggctaattttttgtatcttttagtagagacagggtttcaccatgttagccaggacggtctcgatcctctgacctcgtgatccgcccacctcggcctcccaaagtgctgggcttacaggcgtgagccaccgcgcccggcctaaaagcatctttacttagagaaaacataaatgtttgaggtgatggatttcccaattaccctgatcccagcatttcaggatgctgaggtgggaggactgcttgagcccaagagtttgagaccagcctgggcaacacagtgagacttcgtctctaccaaaaataaaaaaatttagccgggtgtggcgtcgcacacctgtgatcccagatacacaggaggctaaagtgggaggatcacttgagcctgggaggttgaggctgcagtgacctgtgatcacactactgcactccagtctgagtgacagaacaagactccatctcaaaaaaaaaaaaaaaaaatcacctgtactcccaaaaatatgtacaactattacatataaataaaatttaaaagaaaaattactggccagacacggtggctcacacctgtaatcccagcactttgggagtctgaggcgggtggattgcctgagctccagagttcaagaccagcctgggcaacatggtgaaaccccatctctactaaaatacaaaaaattagccaggcgtgctggcgtgcgcttgtagtcccagctacttgggaggctgaggcaggagaattgcttgaacctgggaggcagaggttgcagtgagctgagatcgtgctgttgcaccactgcactccagcctaggcaacaggtcaaaactccatctcaaaaaaaaaaaaattttactatctggcccaatgcagaaaaaattggccaaaccttgctccaaggcctaagtatacactgtttataagaaacacacttggggctgggcatggtggctcatgcctgtaatcccagcactttgggaggcagaggcaggtggatcacttgaggtcaggagtttgagaccagccttgccaacatggtgaaaccctgcctctactaaaaatataaaaattagctgggtgtggtggcatgaacctgtagtcccagctgcttgggaggctgaggcaggagaaccacctgaacccaggaggtggaggttgcagtgagctgagatcacaccattgcactccccaatactcaccacacacttggtcaggtgtggtggctcatagctgtaatcccagcactttgggaggccaagatgggagaatcacttgagcccaggagttggaaacctgcctgggcaacaaagtgagaccctatctctatttaaaagaaaagaaaaggaatgctctttaaatataataatctagatgggccgagactaaaagaatggggaaaagatatgctatgcaaacattaagcctcagaaagccagagtgcctatattagtatcaaaaaatgttaacttcagaacacagaatgttaccaggaataaggagagacattatataatgacatgggtcaattcacctagaggacataagagtcctaaacatttgtgcgcctaattacaaagcttcaacatgcatgaggcaaaaatggatagaattgaagagaaacggataaatttcctgcaattacagggtgagatttcaaaactcctctcaataattgatggaacaagtagaaaatcagtaaggatagagaagacttgaataacatgatcaacctactggccccaatggacccttatagaacactgcaccaccaacagcagaaacacattcagtgcaactccacatagaacagttaccaggacagaccatatgctgagctctaaagcaagtctcaataaatttaaaaggattaaagtcctctagagaatgttctctgaccacgatggagctaaattagaaatcaatcatagaaagatctctggaaaatccccaaatcctgtcttctccatcaatgccttgctgcgtgaccttggaagtgtgctgcagtttcctcacctgtgaagttagtacaattgtaggcccttcctcactgggttttgtgaagagtgactgagttcatccggcacacagcaagtgctatgcaagtgttttctctcattgtcttggtgacacaggaccgacccgggagaataggctcccaccagcctggctgcaggaccccagagcaaccacttgtcttaccgtggccccctctgtcctccctcctggcaagtaagaatggccagggtccctgtagaccatatagatctgaggggcctgaaggcagaggagatgctgaaaagggcctcccagacctcccaccctcacattcccagcacgtaataatgaaaacagcaatgtcctccacagaacacatgtgcaaagctatgctaggcactgggatggggatggagtgagggcttgatagagagacatgaattaaacagcctcctgaaaaataaaaccaaaaccccaagacacaaagacccagggactgactcaacctctccagaaaccaagtctctccaaacccatcttacaggtcaatgctgccattcatgcaaaacaaaattatttggccaggcacagtggctcacgcctgtatcccagcactttggaaggccgaggtgggtggatcatctgaggtcaggagttcaagaccagcctggccaacatgatgaaaccccgtctctactaaaaatacaaaaaattagccagacgtggtggctggcacctgtaatcccagctactcgggaggctgagccaggagaatcgcttgaacccggaaggtggaggttgcagtgagccgagatcgtgccactgcactctagcctgggcaacaagagcaaaactccatctcaaaaataaaaaaataaaaacaaaacaacaacaacaaaaattactcagtgcctggtacacaccatgcaccctctggcccctgaggacacagtgtggatgactggtggtggtgatggggccactcactaaggcagcagagggaacacagactgggagtcagatttgggagtaaagacatgagctctgttttgcacaaggtgagtttggagatgcctgttgagctcccaagaggagcaatcccagggggctggacacatggaggggtctagagatgacttcggaagtgttagtatgcgcatagcatgggaagtccagcagcaggtgagatggcccctgacaaggtgtatggaacagtggtctctggcagggagggcaccctgggaggtgtttggtaaagtgtgggccactggtgctcagcgtaggacagccggataattcgaggcctggtctgaacaatggggaatacctgttctgtgattatctgagcctaactccttggtacattaaaaacccaagttttttttttttgcatgattataatataaaccaaaatctccagaaatgcacctcttgttttaatcgagggatgactggatgttgttttgtttggaactttgctgagagctgctcaccgttgggggaaatcatctgtctctgacagcaactccactcgaactcaagacccaagtcaagacccttgcaccagctgcattagcaaatcatcacgttcacagtgacttgtatttgcacaaacatactcatttgtcaactatttcgatgtgtcagatatcaagtggcaacataattctgttaaatgatcttacttctcatcatgccacttactcattctaagcaggcgccgactgtcgcattctgtcttctggcatagccacacccaggcatttgtgtattgccataatattattttattggaagtcacttccctgctttttccccttcatattgcaattatggcgttaaattgattttttacaaattatgtgtgtaggaagatatattacccttgaatttcagctcagtgtggaaaaggacgtattaaaaaatatttgttataaaaagagggtgttgggtctgcaagcactgaaaactcactagtgtgagtgagaagccccatttgaggggtggcaaaggcaaaaggaacccacagcaaatgaaacaggaccagagaggttggaggaaaccaggaggacacagagcctagaagcaagaagagagtttctagaagggtggctaaccgggcgaatgctgcctggaggtaagacagaggctggaggcatggataaggggtcgcatgtgcgcctggtgcagctggggttgggggaaggcaggcaaagccaagctactggctagatctgaggttttgtggttttctggccaggagggcgtgaggaaaggaggacctagggaaaagttgaggacaatggctgcagagacagcctaggagccacctggagatggacgagtgaaagcaggaagggctcagagaatggaaacagggaggtcagaggactcatcgcaccaagtgaccaagggagagttgggagggatgggggccatggtcagagtgaaaccttagaaatactgactcccggctgggcgtggtggctcacgcctgtaatccctgcactttgggaggccaaggcgggtggatcacgaagtcaggagatcgagaccaccctggctaacatggtgaaaccccatctctactaaaaaaaaaaaaaaaaaaaaaaaaatcagccaggcatggtgttgggcgcctgtagtcccagctactcgggaagctgaggcaggagaatggtgtggacccgggaggtggagcttgcagtgagccgggatcgcaccaccacactccacgctgggcgacagagcgagactctgtctcaaaaaaaaaaagaaaagaaaagaaaagaaataaagaaatgttgcttctcagccaggtgccgtggctcacacctgtaatcccagcactttgggaggccgacccaggtgagtggatcacttaaggtcaggagttagagatcatcctggccaacacggcaacaccccatctttactaaaaatacaaaaattagtgaagcaaggtggtgcacgcctgtaatcccagctacttgggaggctgtggcaggagaatcacttgatcccgggaggtggagattgcagtgagctgagatcgtgccacagcactccagcctgagcaacaaagcaagactctgtctcaaaaaaaagcgggggggggggggggggggaggaaaagaaacgttaactcctgaggcagagctgtcctgaatagtgacaagccctcaggtgtggctgcaggaggctgtgggctgagggggccctggagaggaggggcccaggtagtgggctgtggccaggctgctgcagatcagctaccaggcaagtcctcgagggtgatggcaccaaatctcaccccctacactggaccctgagtcccacgagggcggggactggcctgctgaatcatggtgctaagtcacatctgaagattctcaaacatctgctgaatgagtgaatgtgtgggaggactttgggtgcagaagagagtgggccccagggccaaaggctccgatgagggagggaacatgagtgggggctgtctgggtgacagcgatgggaaggggcagaaaacagctggctagagagtgtgactctcaggaagagggcccctggctgggcggcagaaacagtggccagcagagatgagggcactggtctcccccaaccctcctgtgaggacgccactagatttgtcatggcaggtctcctaggcgccctcccagcacctcacacacctggccctctccctctgtctaaaatgctcctccctctccttggcatggacgactctgtttctgcctttaggactcaacccagttcacctcctcaggggacccttctctgactgcccccatgctctactgttctcttactgtatcctgtttggttcctcaatagcacattttatgtgcatctgcaacatcattatatggaaaatattagtacatttcacttggactgtgtggccggcagaataggccccgcccaccagcaccaaagaagtctctatcctaatccccagaacacatgaagatgtgaccttactcagcaaaagagactttgcagctgtgattaagttaaggatctggatatggggggattactctggattatccaggaaggcccaaaggaatcacaagggtccttaggagtggaagaaggaagttagagagagagatttgtggatcctatgctgctggttctgaagatggaggaaggggccacaaaccaaggaatgcaagtggcttctaaatgctggaaaaggtaaggaaacagattctccccctggagcctccagaaggaactagccctgccaggaacttgattttacgccattgagatctatttcagacttctgacctccagaactataggataatgtgtattgttttaagctaccaaatttgtggtaactttttgcagtagcaataggaaacaaacagagctttcattgggtttttttgggggttttttttttttttttcatttgagacagtctcactctgtcatccaggctggagtgccgtggcacgatcacagctcactgtagcctcaacatcccaggctcaaacaatcctctacagggttataatttgaaatgatacccatccaaaaccatttaaaaaagccatcaagactcgcaagtgtccaagccagtggaccaagtgaattgctaatgcctgccataccacagttagttctacttagttaggagaagggaaaaacctgccacctattaaggttagtcttgacttgaaaaaggcacaaattaaataatatctttgggacctattctttgaataaaataggatgtccagtgttgatttatctgtttacttgtttattctcagctcctctgcctctccaggacaggaatggggctgattcctcacctgagtgcctggcacatggacaggctcaacaggcatctgtgaaattgttagaggcgtgtgaaccagagcaactccatcttgaataggagctgggtaaaatgaggctgaaacctactgggctgcattcccagacgtttaaggcattctaagtcacaggatgagataggaggttggcacaagatacaggtcataaagaccttgctgataaaaggggttgcagtaaagaagccagctaaaacccaccaaaactaagacggccacaagagtgacctccagtcatcctcactgctacactcccaccagcgccatgacagtttacaaatgccatggcaacgtcaggaagttaacctatatggtctaaaagggggaggcatgaataatccaccccttgtttagcatgtcatcaagaaataaccataaaaatgggcaaccagcagccctcagggctgctctgtctttggagtagtcattcttttatttatttatttattgagacagagtcttgctctgttgcccaggctggagtgcagtggggagttctcagctcactacaacctccgcctcctgagttcaagcaattggagtagccattcttttattccttagcagcctcactgaatcctcacaaccctgagacatgggcatctttctccccatctttcagggaggtcactgaggcaaagggagggttgcggtctggccaagctcacatagccagtaagcggcagagctggagctcagctctccccaccccattcctcgtcacacagctctgcaagggaaaacggggaatcaaatcttccaggagatgccacagccccaaccccatccaggcctcagatgggtccctccctcgccccgggcagaggcagatagaaagcttctcaccagactccgctgacacagcgcgtggacagcgcccggggcatgatctccgagccctgctgcatgaagccccccacgggaaaccacaggctgttgcccagcgtgtactggttctccaggatgtgggggcgtgcccgcaggcatgggtgtgggttataccactcataggggctcagcctgtggagagacgtgcagcgtgtggatggggcccagagcccaggtggggaggaaaaggaaagaagcaaaggaaagtcacagtgatcagaagaaagggggagagatggaaaaaggagcaagatggacagaagcacacagagaaaaggcagagagagatgcacagagatggagacagaagaggcagagagagacacagagatactcagagagaaatagagaagggaggaggcaaaaaagggagaggcgggaaggggagagacctgaacagagaaccacagagcacagtcagagccacaaggggaagaatgagactcagacacagggcacaaaactgagaaaggagggcacagggaatccgaggccccaaaggggaggccaaggacagttccgagagagaagaggcaggtcggtcccagaggcctcggctcgtgcctcctccagccccttccttcccagtaggcagtggactcacctggcagccagaaacaggacgcagctgacagccaggtaggcaagaagcatgaagagccacacagcaggggagaaggggtccaggaaggagaagtagccaggcttgcggccctgtggggagagggagtgagacccggagacacccctggcctgagcctcacacccagcccctgccctaccagggacctgggagcctgaccggcccatctgaggtcctggggctgtctggctcccactcgcaggccctgagcctccatgccaggcaagcagcccatggtctccaggggaaccataccatgtgcactcggtagaggatgctgatccccagggtcataaagggcttggaaaagtcgatgaccttctcccgctcagctgtgatggtgaaggcggccacagccaggtctgccttctgctggaggggaagccgggcaggggtggagggggacagaggggaagacagaagtggacagttagagagaaatgcacggagagtgagcaactgagggaggcgagagagagagaggtagggagggggaggggccaggagcatggactgactccaggagcccaccttgggcctgaaatcggaccctcatcgcatgtccatcctcatcatctcacgtctccagacacactgactccgtcccctaggcctcaactgtgtcccagcatcaagggctggggatggaggggttccccaaactccaattcaagcagcaacttctccctagggccataaaagagccaaggtcctgaaggggctgagactgacagcactcgagataatacaggcccggacagaacacagagcagggagagaggaggcagggcccagaaatgaccccgggtggggaggaagggtgcaggtcagcatgtgcccacagccagtggagacataacccaggccccggcccagtgtatagtcagggagatagggcacaagccccaaacagcatcctggtcaggagacgacactggtaccaaagcacaaccctggatgaaggagggatggcccaggcccaaaacttcagctggaatcagaaatagatggcacaggacccagatacaaacccaaggttggtgagagatggcacaggcacaaatgataaccaccaggtagagagaggtggcacaggctgaaaacaaaatccacggtcaaagagagagcagacaggcccactgtgaaatccagggtcggggagaaaggacacagaccccaaagatgaccccaagcagagagggagatggcgcaggctaaacagctaaagccgggtacgggagagatggcaccagcctcgataaaaccgaggagcagagtgagacagcacagccctgaagcatcatccagaggcggcagtgtggcaggggcccagaatgtggattcggagaatctctctgggaattcctgggtgttgagcatagggagcttccatcccctttgttgtacacttgccacttttatgactaatacgtgaattgtcgtggaaatcatcacagctaatataggactccaattattttaagcacccactgggggtctgtcctagcaaggccctgcatggtggccacatcctcatttcagagaggaggaagcaatggcctttcaggtgggctccagtcctggggccaggagctcaagaccccacttcctcctgaaagcctaagggcccccatcctttgttcccacactggccttctcctcactcattcctggggccatgcctcgggccagacacctgcctcttgctgggctgggcaaggacaggggctctgctcccgaaacactcctcagatctgtccatttctctacaactccaccacccgggcctgggccactggtatctcactcctgactacagcactggccgcctcatcggcgccccctgccgccactcataacctcccagtccattcctcacatataagccaagaggacagtctcctgtttaaaacctgccatggcttcccccagcacttaagacaaaaccttctcatggccaagaggccctggcgacctagggctcagctgccctgccagcctcccctcatatcttctgtcttgccagctgtgctccagccatgatggcccgttctttcctcaatgcagcaggctcatgcccgcctcagagcctttgcacatgctctcccccaagctcttcttccccgttccaggctcccatcacacccaccccttcagccctccccaaagcagcctccagaccccacctcactcccactctagggtctctctcacattccccattggcccttttttttttttttttgagatggagtctcactctgtcacccaggctggagtgcactggtgcaatctcaggtcactgcaacttctgcctcctgggttcaagcaattctcctgcctcagcctcccgagtagctgggattacaggggcatgccaccatgcccggctgatttttgtattttttgtagagacggggtttcaccatattggttaggctggtcttgaactcctgacctcaggtgacctgcccacctcagcctcccaaagtgttgggattacaggcgtgagccaccgcgcctggcctcattgtcctgttcttagcacgactggagatggccttactcaggtgcttggtaataggctgtcttcactccatacaggttccttgcctgtctggctcagtgaggcagcccagagcccgcagagagcaggttcccaacagatcctgctcgggtttgaccgagtacagcctctctgactggcattccaggcagccgacggctcccccaccgcattcctgggccactcgccacccctctctctcgtgccagcttctttctggctacgcctgaggcgcctgtccactctgtagagctggatcccatccatccctccagggctcctcacaccttcactcctctgggaagccattcatggacccccactccctggacaccacttgatctcaacaacttgctcaatttggaaaatatctgtctcttctctgcctctgctgctaaaccacaggcgtttcagaagcaaggccagctggacatgtcatgtgtttctggcactgctcaggggccagcttagagcaggatctgctgtgtctcatgtcccatcctcctccgctgaaacccaggaatgttgctgcttcctctggggccctcccagatgcagagacctcttcttccctggtgccacaatgaaacctcacgcagtcagacgcttgcatgcacacagcacttaccccatgcagccactgtcccagggttttccccagagtagactggtccccagagcaacccaatgcagagggacctccatttctaccattctacgcatgaggaaactgaggcacagagactaagcctcttgccacagttgacccttggattcggaaccactcccctcctaggggctttatctgcctgctgccctggtcgctccatggctgggggtgtctgaggtctggcccaggtgagtgactcctccctggatcccagggagttcaagaaatgagggctgactgatgggaggagtcagtgagtccttgaacctctggccaatatggcggcggcagcagcctccacctctccctgacactgctccacatccagtcttccagccagcaccatcccagacagaaacatgggggttgtcctgtacacagcctctccctcacccctcactgcatccatcctcaagcctcctgattttgacccctaaacacctccggaacggagtcactgccctctgcctccactgcccacacccgcccaggccaccatctctgactgaatagctggtctctgcctcccaggacacacagcctgcagccccagagataccaacatatgacagtctggtcacagtattttcctgcttagattctgcaacgggctgggcacagtggcttatgcctgttaacccagcactttgagaggccgtcaggaggattgcttgagccaaaagttcaagatcagccagggtaatgtagcaagaccccatctctactaaaactaaaaataaataaataaattctgcaatgactctgcttgtttgtatttttctttttagagacagtgtcttgctttgttaactaggctggaacacagtggtgcaatcataagtcactgcagccttgaactcctcaagtgatcctcccacctcagcctcctgagtagctgggaccacaggtgcgagccactacgcctgactaattttgtttatttcttagaaagaccagggtctggctatgttccccaggctggtctcgaactgctgggctcaagtgatcctcctgcctcagcctcccaaagtgcttggattacaggcatgagacacagcgccttgttctttttattattattattattttttagaccaagtcttgctctgtagctcaacctctgcctcctgggtttcagcaattctcctgcctcagtctcccgagtagctgggactacaggcagatgccaccacacctgtctaatatttttttagtagagatggggtttcaccacgttggccaggttaatctcgaactcctgacctcaggtaatccgcctgcctcagcctcccaaagtgctgggattacaggcatgagccaccgcacccggccctatttattattattattattatcattatttttggagacggagtctcacttgtcacccaggctggagtgcagtggtgcaatcatggctcagtgcaacctccacctcccgggctcaagcaattatcctgcctcagcctcccgagtagctgggattacaggtgaatgccaccatgcccagctaatttttgtattttagtagagaaggggtttcgccatgttgcccaggctggtcttgaactcctgacctcaggtgatccacctgcctcagcctcccaaagtgctgggattacagacatgagccactgcacccagccaccttgttcttaaactgtcatccaaatgcctcacccgacccaatgaggccctaactacacctatcacctcaataagactatgtgccatgcctgttccccttatgagactctgtcttacacctggccccaaaacgtcccgcaccatccaacccccacagcctcatcccctaccatcttgccctgtgtcccacattgcagccacactgccctttccatttgttcattctttcatttatttacctgcctgacaaatatttgtatagcgccctccactagcccagcacaattctagctttggggatacggcggtgaatagaaacatacaacgtcaggtagtgacaagtgctgtgatgaaaaatcaagcaggcagcaagagagagactcgagggagatgctgttttggatctgctccccactgttgcaaggggggtcttatttgaatagcaacatgaaggaagtacagaaaaggcaggagaagacctagggggaaggttccaggctgagtgatcagcgggttcagtccctaaggtgggaagagacttgcagcatccagcaaggctggagcagaataggagggcctgggaaggcagcagagtggggccaagagcctggcagggccttgcgggccacagtaaggtaactggattctgcaccttgggcaatggaggacattgcatgaggatgtcatataggaaggtgtgaacagagggtgacattatcagaccacaggcacaagagtggatgtgggaaccagggagccaactgcagatgcccatcacagtgctgggggcaggactgagtggcagcactggtggtggagagagacagtgagatttgggtctcatctgaaggtgtgatggaaggatcctaaatgctgcaagttcttcctaggctcctcccagagcctttggagcccccttccctcctcctactcacttttcatttctaaaagaaaggcttatttatttgtttttgtttttgagacagggttttgctctgtcacccaggctggagtttagtggtgtgaaaatggctcactgcagcctcaaactcttgggctcaagcgattctcctatacctcaacctcctgagtagctgggactataggtgtgtgccacctcgcctggctaattttttcattttttgtagagacgggggtcttactatgttgcccaggctggtcttgaactccttggctcaagcaatcctcccaccttggcttcccaaagtgctaggattacaggcgtaagccaccatgcatggtaaaagacctattccttagagatgacttccccaccctgacatataccctctagcccctaccctgacgggccccctcacagttatttaatctctgaaatgaaatcaggaagaatttgaatgacaagtcacctgtaatgatggggggggggtgtcatctaaatgcccaaagccaatcaaagcacttgtgatagtccctcagctcccaacccatcctgtataccctgttctgtgtaaaccatattcctgctttgcctgctgcgccctgccaggctctgccaatagggggcgctagcgggaggttgccagactgaggagggaagagggattgctccttcctgtctcctctcccaccccagccaccttctgcccctcctggcagcatcgtttcttctcctggcagcagatgaatccggtgtgcagcttcccaatatctacaaacccatctcatccagcctctctccagaacccagcaccagctgtaagcacctctccccagggtctgactttcagctccacagagcccttcctctaagtttccaagagtttcagctcttccctttcttccttcagaactagggatgtggccacttcctgccatgatacctccatgacacctgagagtgaggggtgggaaagctatggcccttgggccaagtccagcccatctgcctgcctttgtacataaagttttattggaacacagtgatgcccactatattgtccatgactactttccatacaacagaagagctaaggagttatgacagtaaggccttaaagctgaaaatacttacactcttggccagaaaaagctggctaggtcagtgcagtggcccatgtctataatctcagcactttgagaagccaaagaaggaggattgcttgagcccaggaattcaagactagcctgggcaacacagtgagaccccatctctacaaaaaaaaattttttttttgagacagagtcttgctctgtagctgggctagagtgcagtggcgcaatctcagctcactgcaacctccgcctcctgggttcaagcaattctcctgcctcacccttccaagtagctggaactacaggcgtgtgccaccatgcccagctaatttttgtatttttagtagagacggcgtttcaccatgttggccaggatggtctcgatctcttgacctcgtgatccgccctcctcagcctcccacagtgctgggattacaggcgtgagccaccgagcctggctgctacaaaaacttttaagaattaactgagcataggtgtttgagaccagcctagccaacatggtgaaaccccgtctctactaaaaatacaaaaattagccaggcttggtggcaggcgcctgtgtaatcccagctacttgggaggctgaggttgcagtgagccgagatcgcgccactgcactccagcctgggggacaagagtgagacttcgtctcaaaacaaacaaaaaaaccctagaggtctgcaccatgagctagccactggtgcttgctcaaggctccatacagcattcctatttgccatcaatactttgcgaatgaatctcccgatctgctggttacatctggcccaggtggcagatcagctcgcatgcagcctggactggctgcagagtctttgatgctctggacctcactccagatgaaaaaagccttacgggctgtagggaaagtaaatggattgaagtagcacatcccaatgtggtatgagttgccaccaaaatccaaaaagtccaccaaatgtcacatcatcaaccaaacagcaccccctcctcagcagtctgtctcagctctgtggggccctcctctaagcttctaagttttcatctttcaaactcttctacttgtcccttaaggactaagtgtggtagctgctttctgccgttgctactgccatgacctcttagttttctttttaccccttaagttagctggttaacaactttacatttagttaacaattctttatactaaatactctctattcaaataactgatatgattctattcaagtaaatggagctgggttttgttttgtttttatttttgtttttgtttttgtgacagagtctcgctgtcgcccaggctggagtgcagtggcacgatcttggctcactgcaacctctgcctcctgggttcaagcgattcttgtgcctcagcttcctgagtagctgggattaaaggtgcgtgccgctgagtctggctaatttttgtatttttagtagagatggggtttcactgtgttggccaggtgatccacccacctcagcctcccaaagtgctggtattagaggcgcgagccaccgtgcccagccagggttttgtttttgtttttcagacagggtcttgccctgtcacccaggctggagtccagcagcgtgatcatagctcactgtagtctcgaactcccaggctcaagtgatcctcccacctcagccttccgagtaactgtgactataggcatgtgccatgcccagctaattttttttttttttaatgtttagtagagacaaggtcctgctatgttgctgaggctggtcttgaactcctgagctcaagcaatcctcctgccttagccttccaaagtgctgggattacaggcattagccactgcatctggcaaccggcgctgttttgtatccagactggaccctgccagactggaccctgccagactgccatctgccaggtttaatgccaactgcactgactcaactacttcctgctcatcagatctgatcagcatactgttgtcaatgtaggggaccagtgtgaggctatgtggactgtagagttcaagttctttgcagcctaaatcaggacagaaagtgggaaagttgatgtcacactgagcaagactgtgaagatgtgaaccttgccttctggtagcccttggaaattggtatggagaaaaaagcatctgccaggttagtagctcacaccagctgccaagggctgtgctgacttgctccaatagagaaacttcatttgggacagcaactgcaattggagtcacccctgatcacgttgacaataatccaaagtcattcttccaaaatccatctgccttctgtacaggccaaacaggccagctgaatgtagatgggatcactacccctgcttcttccaagccgttaatggtgacactaatttccacaatttgcacaaaggatagagaattgcttttgaattactattctgggaaagacagggagttctaggagcttccacgtggctctttctaccataatggccctgactccatgggtcagtgcgccaacgtgggattctgccagctaccatgtgtgtctattccagttatacaaccaagaactgggaaaacacagggtgggaccatggccccatcaggccccttctgagttaacctgggctcagattccaccaatcacttgaccacataagtcccactgtgtggtctaccagtcaaagcaggaaaaatcaaaatgatatgccatccatgaaaatgacagggagttgtctaagtagctaaaagccgataaaaacactcaatgctgagaaggagcctatatagaaactgttgtagtctttctggaaaataattcaacaaaatatcacgaaagccacaaaaagggtattcttcttccacccagttattctgttcagagaaccaatcctaagaaaataggctgcaatgcaggcaaagcttttgtgcataaagatgcttgttggccaggtgcaacaacccatgcctgtaatcgtaacactttgggaggccaaaatgggtgaaccacttgagcccagggactcaagaccagcctgggcaacaaaatacaaaacaattagccaggcatggtggtgcacacctgtagtcccagctactcaggaggctgaggtggaaggagcacctgagcctggggaggttgaggctgcagtgagctgtgatggcaccacagcactccaacctaggcaactaagtgagacgccaatctcaaaaataaaaaaaagatgtttgttaatgattatttataagagcacaaacaataaaaacacctggaaacaactagttatgaaaaatggctaaataaattatggtacatccacatggaattactactatgcagccaagtaacattctgtttaggttaaaacaatgatattatatttggcctttgagatgggcaaagattttattttagagattggtaacactgactgttggcaagagtatgggaaatttcacattctcatgcactttggtaggaatataaattggcgaagcctttttgaacagccatttggcagtatacacttagaaaaaatttataccctttgacccagcactttcacttcttggaatgtatccctcaggaacactcccacaaatccacaggccaagtttatcatgacactggctatgctagcaaagctggaagccatccaaatagccatcaataggggatatggtaaataattcatgctgagccacacaatggaatccttatatcctcacttgaattttaagcaggcatctcaaatgatccgtgaccagagaaaactcttgtttcccggccccagcaaactgctcctcccatgtcctccttatagtggaaactggcctcgccattcgccagctgccctggccaaaccccatagtcaccccgattcctctcttcctcttatgcacatccaagctggctgcacacctgacacagctgccactcaaaccaaggcaacatcttctctcatccacaccctccaacagcctcctaaatggaccattcagtttctactcttgtcccactaaggtgttcctcaagacagcagccagtgcaatcatttttaaatgatttaaaaattagatcctgctggcctatgcatacaatggaatattattcagccataaaaaggaatgcaggccaggcgcagtggctcacgcctgtaatcccagcactctgggaggctgaagcgggtggatcacgtggtcaggagatcaagaccatcctggccaacatggtgaaagcctgtctctactaaaaatacaaaaattagccgggtgtggtggcgtgtgcccgtagtcccagttactcaggaggctgaggcaggagaactgcttgaactcatgaggtggaggctgcagtgaaccgagatcatgccactgcactccagcctgggcgagaaagcaagactccgtctcaaaaaaaaaaaaaaaaaaaaaacggaatgcagtactggtatatgccatgatgtggatgaactttgaaaagttggaaacatcatgcaaagtgaaagaagccatacacaaagaccgcatattggatgattccatttatgtgaaatatttgcaataggtaaacccatggagacagaaagatgggtggttgccaggggttggggtagcggggagggagtggggagcgactgcttaatgggtatgagttttatgggaggttatgaaaacgttttggagctagatagcaatagtgattacacaacactgtgaatgtactaaatgccactgaattgcactccttaaagtggttatttttatgtgacataaatttcacctcagtaaaaaagagaaaaaaaattgatcaggctgggcacggtggctaatgcttgtaatcccagcacttttggggggccaagggagatggatcatttgaggcaaggagttcaagaccagcatggaaacaaggcaaaacgccgtctctattaaaaatataaaaattagccaggcatggtggtgtgcgcctgtaattccagctatttgggtggctgaggcacaggaattgtttgaacccaggaggtggaggtcgcagtgagccgtggtcgtgccactgcactccagcctgggctacacagtgagactctgtctcaaaataaaataaaatatcatggcacattccttgcttaaaaccttccagtggctctgcagcacgataaaaataacagccaaggccaggcatggtggcttacacctgtaatctcagcacttcaggaggtcgaggcaggtagattgcttgagccgaggagttcaagaccagcctggccaacatggcaaaactctgcctctacaaaaatacaaaaaccagccaggcgtgatggagcgtgcctgtaatcccagctactgggaaagctgaggtgggaggattgcttgagcctgggaggttgaggttgcagtgagccaagatggcaccactgcattgcaccactgcactccagcctcggtgacagagcaagaccctgtttcaaaaactaaaaaataataataaaaaataacagccacactccttagcagtgactgtgaggccctgggatgtgggccctgctctcggatctctctgcccctcactttttcccctcaaccacacttttcccctcaagtctttatacatatgggctctctacttggaaaacactcttccccagatccatcctttcacttggcaattatttgctgcgcaccagctgggtgtcagatggttctaggcgctggggatgcagaagtaaggaaaatagtcaaacttctgccctcataaaaccctccctggtggctcttctcaggactgtattccccaccccttttaggtctcttctcaaacgttatccaaccaccttgtctaaaacagcatccacgcaccagacacttttatctccttaccttgcttcacctaacacgatattaatatatcatacgctgtcagtttcccccactagaacatcagcagttggggcggggggcgggaaggaggggacaaggagcacctctgctcattacattgctgccccctagtggccaggatgcagtgggtgcagaatagttgctcagtagttattcagtaagtgaatgactaaatgtagctggtttgtttttgttttcgtttcgctcttgttgcccaggctggagtgcaatggcaccatctcggctcaccacaacctctgcctcccaggttcaagcaattctcctgcctcagccccctgagtagctgggattacaggcatgcgccaccacatccagctaatttttttgtattttcagtagagatggggtttctccatgttggtcaggctggtctcgaattcccaacctcaggtgatccgcccacctcggcctcccaaagtgctgggattataggcgtgagtcactgcgcctggcctaaacgtagctgtttttaaagatgaggcagatctatgtgtactaacgtgggaagatggccaagttacaagtaaaaaaagcaaactacacagcagtaagtatagtaagatatcatttttgcaaaaataaaaatttaagaaatttaggctgggcatggtggcttacgcctttaatcccagcaccttgggaggccgaggtgagcagatcacctgaggtcaggagtcgagaccagcctggcctacatggtgaaatccccatctctactaaacaatacaaaaaaattagcctggcatggtggtgggcgcctgtaatcccagctacttgggaggctgaggcagaagaattgcttgaacctgggaggtggaggttgcagtgagccaagatcgtgccactgcacgccagcctggggaacagagccagactctgtctcaaaaaaattaagaaatttaaagatgtacctgtattaatgaatttgtagaaaatgagttggaggaatatggtctctgaggtgtaagaacatcatgtatatccagtgtttctgctatttgtaccatttggtattttatcatttagtattacatatataaacagaaaataaaggagttccttctcaaataattgcttatgaaaatttctgatggtatgcaaaaatgctttttaatgcatatatacttgctattgttgtgcaaaataggattatacttaatacaaatatgttttataaccggaaacacagtataatgtaaaattttttaatgaaatggactttatttatttatttatttatttttatttttgagacagagtctcactcttgtcgcccaggctggaatgcagtggcgcaatctcggctcactgtaaccttcgcctcccaggttcaagcgattctcctgcctcagcctcctgagtagctgggattacaggtgcacaccactacgcctggctaatttttttgtacttttagtagagatggggtttcaccatgttggcggggctggtctcgaactcctgacctcaggtgatctgctcgccttggcctcccaaagtgctgggattacagatgtgagccactgtgcccagcctatttttttaaaacagggtctcactctgtcgcccaggctggagtgcagtggtgcaatcatggctcactgcagcctcaacctcccagactcaggtgatcctcccacctcccagcctcctgagtggctgggactacaggcacatgccaccacacttggctaaattttttcaatttttgtagagatagggtttcaccatgttgccaaggttggtcttgaactcctgggctcaagtgatcctcccacttcggcctcccaaagtactgggattacaggcgtaagccaccatgcctggcgtgtgtgtgcgtcttctatcagatgaagagaactggggacaacatttctaaagactccttgatagaatcagtcaattgcccattcaacactaatttactagaaacctgccatgtgtcaggccctgagctggggacatagctaagtagacaaggctcccatccccagggtgtggaggccacaggtgaggtgggtgggtattgtcttggtcatgccagcatctatgacctgtgctgatctcatctgtcccctgtgatacccctccaagttagggggtcaccactccccatttgaggagacactaaggctcagagggggcagccacctgcctgcaggtcacaaagccagtaaggagtaagtccagatttgaacccagggttagccgactccaaaacccattcttctaactacactcacatacagaccgcctcaagaaaggtatctagcagtagtgaccacatgtgagccaggcatgtgccaggctctgtgcaaatgcgctctcatttaattgccttaaaactcactggctgggtgcagtggctcatgcctgtaatcctagcactttgggaggccaaggcggacagctcacttgaggtcaggagttcgagaccagcctggccaacatggcgaaaccccgtctccactaaaaatacaaaaatagccgggcattgtggtgcattcctataatcccagctacttaggaggctgaggcaggaaaatcgcttgaaccctggaggcagaggttgcagtgagccgagatcacgccactgcactccagcctgggcgacagagtgagactctgcctcaaaaagaaaaacaaaaacaaacaaacaaaaaaaccctctgtgagggaggtaacattagccccttttcaagaggagtgactgaccttcagagataagtggctttgcagggatcatgtgggagcactggggacctgaagctggctccttctggctcctaaccagtgcactgctatagtggactccatggtggctacccagactctgtttcaggagtggggcactcattgcctcagctgcccagggtgtaggtggctgatggctctcagctctgtcagtagaagagcgtcccctcacccaaagtcctgactctccccaagagcagcccacgtccagtgacatatcagtgggtgcttaaaggcctggcacccttaccacagggggaggtccttgacggccagctcagctccagagctgcctgtgggacagctaaggcccagttgtgactgcagcgcagctcaactcctctgcccaagcctgcttccttccctcctgcacagggcaggtttccaggggcacgccatcacacctcctgcctctacatctccatctcagagtcagcttcctgggaccctgacctaagatcttctttgcccttgaaggctaagctttatcctgagggcctcaggggcttcagttaaagcatacaagtgacagatcagactcacactgtagaaaggttctattggaggacaagctggggagtggagagactagaagccaggaggccagtaaggaggctgatgagaggggtgggacctgaattcacaccatggcagtgatggcagggagaaggccaatgtcagccatggccactgggtggaaaaaatgggtcataattcaagacaggccaaggagacctgtgcctggcccaggggtgactggcaggatggtggtgccccaggctgtcttccatctggaagtcactcaccagctctgggccaccctgatggggtgcccaccttggctctcctggtcactagccatgggcctggacatgaaaccttgatgcctcactgtacatttgagaaaacggggctaataccagtccctctctcactgggtggccatgaggagtcaaggatggagacaagtcagaaagctcagacaagggcctggcacagcgtgccactccatcagtgtactccgagcttcccaagttcccagctggagggctggaaagggcacgggccttaagtcagacacacctggctgcagccctgtgcactggggactccagatctcacactgggcagtgatcctcaggccatgaaggactgctatgaaaattatgttaagtaacacttgaaaagttcctcgcacatggtgtgaaatcaacaaatgacagctgctgctgttgtgatgacggtggtgactattcctgtgcagctcggcacactcggctatcccacagcagggcaaggccaaactccgcctatccttcacgctccagctcctcctccagtgttctccctgtaaatgtcattgccatcacccagatgcccaagccagacacaggaggaatgctctccctcctgtcctctcctgcatcccccaccctaggcagtcaccaagccctggtgctctttagcccttcccctagtctctagctctgacgttctcccgcctgaggcccaccagctcattccttatctcctcactggtcttcctgttaccactgcttcccccaaccccagggccaattcacttgagccagatcaaaacccttcaagggtggccgggcatggtggctcatgcctgtaatcccagcactctgggaggctgaggcaggtggatcacctgagttcaggagtttgagaccagcctggccaacatggcgaaacccatctctactaaaaatacaaaaattagccaggtgtggtggcatgcgcctgtagtcccagctactcaggaggctgaggcaggagaatcatttgaacccacgaggcagaggttgcagtgagccaagatcaccccatggcactccagcctgcctgggcagcagagccagagtccgtctcaaaacaaaaacaaaaacaaaactcttcaagggcatcccatgggctttctgctgaggcccaaaccctttagcccactcagtaagagcacatcgggcttgttcaccatggtatccccagggtatagcacagggcttggtatacagtaggcactcaacaaacattggctgaatggaaaatggatgaacacacaaatctatgtatgtgctggccatgctggtatgaataataacaataataaaaatagtataatcccagcactttggaaggctgaggtgggaggattgcttaagcccaggagttcaagaccagcctaggcaacagggccagaccccatctctacaaaaaacacaaaaattacctaggcattatggcatatgcctatagtcccagcaactcgggaggctgaggtgggaggatcgcttgagcccaggaggtggaggctgcagtgagctgtgattgcactactgcgctccagcctgggcaacagagagagacccagtctcaaaggaaaaaaaaaaaaggacacacgcatacagcacccactatgcaccaggccctgttctaagttcttcactgcatgttgttcttcaaaacaaccctatgtgctaaagggctgttattccccaattttacagttgaacaaactacaacctaaagaaatgttaagcacttgcccaaagccacacaaccagtgcacagcagagctaagctttaaacagccaaccacagacactctcagctgccacactttgctggccccaggccccaaatcctctcaccctaccctactgagtaggccctgagacacaaaggtcagacagctgtaaataagaactgttccagacttctctgttggtgaaaaaagggcatccagtttagagtgacttcaggtgcagggctactcccttggagcctgcttatttctgggataccagatgaaagaatatttctgagcctacgtgactaaagaccaggctgtggaaacaggtcacgaggaagcctgtgccctcaggtgggcatagagctgtcagctctggggcttctcatctcctgtctcacccggggcctctttgggcttcaggctttaaaattcaccctgggctgggtgtggtgtctcatacttgtaatcctagcactttgggaggtgaggtgggcggatcacttgaggccaggagttcaagaccagcctggccaacatgatgaaacctgttgctccaaaaaatacaaaaatcagccaggcacggtggcgcacctgtaatcccagctactcggaaggccgaggcaggagaatcgcttgaacccgggaggtggaggttgcagggaggcagaggttgctgtgagcagagatcgtgccattgcactccagcctgggcaacagaggagactctgtctccaaaataaataaataaataaataaaataataataataataaaattcaccctgaccttaaaactcaccctggggcagaagttttcaaaccagctggcagctttatggggcagcgccttgggacctgcctgtggggtggggtgggaggcacccccatctctgccttcaccagagcagctctgctcttgcccagggttctgagggagtttgcaattggaaaaaaagttctgtcaaaataacttttgaaagtcagtgccctaagggataaacgtccttgtcaagcaaagtggccctctcatgtcttccctcgtgatgttcagggggttggatgctgtaaattctggcatgagagagaggagggtgagaatctctgatgagctctgtcaagtctaacgtcaaggctgccctggccatctctggccacagccccttggtctgcacaccagctctgggagtgtcctaatcaggggcctacttatctcccagggcacagtcctgcctctgggcagttgtgcccatagtttctcccacctggaataaaaagaggaactacatttcagtcccccagtatctgccaagcgatgtgtgaggtacttgtccccacgtcccgtaaccctcactatagacctgcaaggtattattatccccatcttagggaggggaaaactgaggttcagaggagagaaatgacacttaaggattcaaatctaggagtgtctgacacccaaagatcctttccactgcacccttgcctgccacctcccatggccctgccttccatccctcctcagctgcaaccaaattctgcccacgctcaggccccgctggttcctccagtgcatcccactccctagtatcgccccatctttgtagatgctatttcccctgctccaaatacactccccttctcccacacccccttcaccttgctaactccttcatgacctttgggaatcagtttgggtatcgtctcttctgggaagccctactgggatatctgactgggtcaggaacctcctctgggaccgtcctctgagctccccaatcacagcccagacagctctgtgctgtggtcattcactgtcttgcgccccaaagagactctaagctcttgggggcagggtccagatccactgtgctcacagtgggatcccatgcccagcaagaggcaaggcacatagtaggtactcaataaacagccactgaatgggtgaatgtatgagttctacatgcagccctccaggtccatgatgtgccaggccctccctagcaggtgctgggcatagcacacaggtgaggtgtgctccctgctctcagccctgcctcctgcaggaagcctttgacctcctcagaccttttcctgctccccactccatgtctctttcattcacttaacaaatctttgcacaccgactaatccaaggtggcatgaaaggggcatttggcaaagcaggacacaggtggtgatgcatgtaccacctctcctcctctgtcccatcccacagcacccgccaggcacaggcatacagcgcaacatcagtgaggtggtgtcaggggcccttcatggctccttcctcttctgccaccagccaggctgcttctgaggttcgactggctgcccagctgcccgccctccctcactcgccgggtccatgcatctttcccggccccagtccagccatacccggttgatgagctcgccaaccatgcccgtccaggagccgttgggctcgggcgccccgtacagcccatcctccaccaaccgcaggcggtagcggaagcgcagcagctcggccagctcccgcagcatgtccacgcagaagccctcgaagcgttcgttccccgacagggcctggaagttgggccggcgcatgacgtatgggttctcctgggtgggcagaagaaagcaggggtcagaggctgggtgtctagtggctgggttgcggatcctggagcccggaccaggcaggtagagcaggaatctgcttgctgagcacggttgatttattcatagtacacatttctcacttacaaatgctcagagtggggaatagacctgaaagccagggaaaaacacatgggtactgccagttcctagcagattgcagggagccattttaatcttcagcagccaacctgatgctcattggtgccaagctcaaatgcgtatgagggaggaggtaactttagagtcagactggatagatcttgtgccaaagtggatcaggggctttcagatttcttattacaattcacagtaaaagatacattttaccctgcaacctaattcacccacacatgaacacacgtaactagacttaattccacagaacagtccttgccctagtaactatgggcaatacactgatattttctattctgctatacttcatctttccacatggctggtaatgactcaccaaaccaacttcatgagccactaatgggttaaagatggtattccctcaccagggtttagctccagtccaattccccatgagggaggcaggctgaagatgacagatggtgcaattttttttttttttttttttttttgagacagagtcttgctctgtcacccaggctggagtgcagtggcgcgatctcaactcactgcaacctccacctcctgggtttaagcgattctcctgcctcacccccgccaagtagcttggattacaggtgcctgccaccacgcccgcccaattttgtttttgtatttttagtagagacggggtttcaccatgttggccaggctggtcttaaactcctgacctcaagtgatccgcccacctcggcctcccaaagtgcaggtgtgagccatcgcacctggcccagatggtgcaattttaagagaatttggaaacttaagattgttttataaagtctcctggttataaatgttagcaactctcatgcctgaaatctcactgctttggaaggctgaggtgggaggattgcttgagcccgagtttgaggctgcagtgagctatgactgtaccactgcacttcagcctgggcaactgagcaactctgtctctaaaataaaataacataaatgttagcaactgatacggttaggctttgtgtccccacccaaatctcaccttgaattgtaatccccataatccctatgtgtcaagggagagaccaggtggaggtaactgaatcaggggggcggtttcccccatgctcttctagtgatagtgagttctcacgagatctgatggttttataatgggctcttcccccttcactcggcacatctctctcctgctgccttgtgaagaaggtgccttgcttccccttcgccttctgctatgattgtaaatttcccaaggcctccccagccatgctgaacctgtgagtcaattaaacctctttccttcataaattaccgagtctcgggcagttctttacagcagtatgaaaatgaactaatacagcaaccaattcaaattctaataccaattattattaaatgttctgcaggccaaaacaaacacagtttctagtttgcaatctctgacctacagtcagtttgccacattgacgcttatttctgaggggtttgagcaaactttactgatcccgttgtgccaaagaaacacaaaagcagaaagaatggtccaagtgctaggaaaacaaggcatgtgatgatggtaacaaatgggaaacttatctggacacagttattgtctaaatggttgtttgtacaatgtcactttggaataatgaacaaaaggacttaggacttagggaagagccaggaaagagctttggttaaaatatacacaatgagccaggtgtagtacctcaagcctgtaactctaacactttgggaggccaagacaggtggatggcttgagcccaggagctcaagaccagcctaggcaacatggcaaaaccccgtctctataaaaaatacaaaaattagccaggcgtgctggtgtgcacctgtagtctcagctactcgggaggctgaggtagagtcccagaggctcaggttgcggtgagccgagatttcaccactgcaggccagcctgggagatggagcgagactctctcaaaaataaaataaataaaatatccacactggttattgtgtattgagaaactgtgctgtgcattctctcgatgacattattttaattccttatggtgaccttacactgaaatgggcataagtagattccttttacacatgtggacacggaggctcaaagtggttaggtgacctctgtcacctctcattcattcaacacacaattactgagctccatggtagatgtggccacaatattgtgctgcttcttctagcaacagatggggtccatttctccctgggttcagacttcttggtctgagctggccttatgacttgttttggccaactggatgtggcagaagtgatgccgtgtgaattccagagtctcagccttcagagcagcccccatttaaggaagcccaggctggcctgctggagggtgagtgaaccaaggcatgccagccaacagccagcatccacagccattctgcactttccagtccagtctggacaccagctgaatgctgccgcagtgtgcccaagtgagaccagccaaagaaccactaagttgacccacggaatcatgcaaaataatcaactgctattgtttcagtttctgggttctgggtggtttgtcacacagtaatagaatctcctactatgtggccaggtcataggctctggactccaggaccccacagagccctacagctacagggtgatggaatggagggcagtcagtgattctctattaagctgcctttccagaaccaaaattgtggaacggggaacaagaatgtgagataatactaataatagcggcagcagccagcatttcttgtgggcttgctgtgtgacagcaattccgtcagcgtgggatggcagtattattacgtctcttttagagatgaggatgctgaggtccagagaagtgaagtagtaagtggctgagaaggacaagttggtctgattccaaagctccgctcttaagccctgtgctagactgagctcaagtggacagaatcagacagtggatatgggagaagccagagagagacgagggacccaggttgggtatcaaagctggagaatcagaaactgagaatcctagagacaagggcctggctcccatacagcccccttgacatatagaggatagaaccaaggctcagagaggtaaagcatctagcccaaggccacccagctgaagcagggcagtgggaagggagacggggcagagctgggcttcacaacccagtcactgtgcactctgaaccctgttccttccactatgccaagctgatctctaaattcaagactgaggaacttaggttcagggtctcaggactggggtctgagcttagggagacaaaaagagactggggcctgtgaatagaaattagataaccgtaatctaggactcaacttagagtcacagactatcagaacagaagggtcctcaaggagcctcaaatccagggtcttcagacttcaaaaagaatcttatgcagaagcccaacactgcagccagacaatgagatactgctaagtccagttctaagaatttaccctacaaatggctgtgcatcaaaaacgcaggtccaagaaagtcagtgcagcattgcttgtagtgagaacaaagactgaaacaacctaatttgggccaagttaaaaagattatcgatgtcataaaagaatcccaggcaaccactaaaatagcaaggtctacaagatatattaggaggaaaaaaacaagctacagaacaacgtgtacaatatgctactctttgttaaagaaagagcaacgatgtgcttgtatatgcatagacatttctgggaggatggtggcctctgaaaaaagaaaatgagagacccagggaaggaaggaaactgatttttcactcctcacctgccttgtactctttgaattctattttacgtaggtttgtattaacttctgtcccttccccaattttatttatttatttttgagacagagtcttgctctgtcacccaggctggagtgtagtggtgcaatctcggctcactagaacctctgcctcctgggctcaagtgattctcccacctcagcctccggagtagctgggaccacaggtgcgagccactaagcctggctaatttttgtattttttgtagagacagggtttcatcatgttgcccaggctggtctcgaactcctgagctcaagtgatctgcccaccccggcctcccaaactgctgggattacaggcatgagccaccatgctcagcccccttccccagtgtaacaatttttttaaaattgaagtatgatatttaagtgtgtatgaacatgcatggttggctgggcttggtggttcacgcctgtagtctcagcactttaagaggccaaggagggaggatcacttgagcccaggagttcaagaccagcctgggcaacataggaagaccccgtctcaataaaaataacttataaaaaataaaaagaaatgcaaagagtcaagaagaaccaaagtaatcctaaagaagaaaagcaaaactgggggtttaccctgccaaatgttaacacttaatttaaagctatggtatttaagacactgcagtactagaacaaagacagacaaacagacaatagaatggagtgtttggaaacccacatataaatggatattgatttgtgacaaaggtaaaactgtcctgaagggggaagaattattgttataataaatggtgctgctgaattaaatacccatatggaaaaaaatgtattctggccaagtgcggtggatcatgcctgtaatcctagcactttgggaggctgaggcaggtggattacttgaggtcaggagttcaagaccagcctggccaatatggtgaaacccctatctctactaaaaatacaaaaatcagccaggcgtggtggtgggcgcctgtaatcccagctactggggaggctgagacaggagaatcacttgaacccaggaggtggaggttgcagttagccaagatcgcatgctactacattccagcctgggcaacagagtgagactctgtctcaaaaaaaaaaaaaaaaaaaagaaaaaaatgtattttgactcccctacctcacatgctacataaaaatcaatttcaggaggatggcagacccaaatgtaaaaggcaaaattattaagtttttagaacacaaatagtagaatatcttcatgatataggggtatacacggaattcttaaattctaaaatcattaaccataaaggaaaaaagctgatgaagagaactttggtaaaattaaaaatcaaatccttttatccaaaatatactactgagaatgaaaaggtaagccacaaagggggacaggacatttgcaatacatacatcagacaaatgacttgtacccaagaatgtataaataactcacaatcaggctgggcgcagtggctcacgcctgtaatcccggcactttgggaggccgaggtgggcagatcacgaggtcaggagatcgagaccatcctggctaatcggtgaaaccccgtctctactaaaaatacaaaaaattagccgggcgtggtggcaggcgcctgtagtcccagctacttgggaggctgaggcaggagaatggcgtgaaccgaggaggcagagcttgcagtgagccgagattgtgccactgcactccagcctgggtgacagagcaagattctgtctcaaaataaaaaaataaacaaataaaaaataaaaaataactcacaaatcaataaaaagtcacatatcccaatttttttaaaatagaaaaagacatgaataggaaccttgcaaatgaggatttccaaatagccaataaagggccaagtgtggtggctcatgcctgtaatcccagcactttaggaggtcaaggtgggtggatcccttgagcccaggagtccaagaccaggctgggcaacatggtaaaaccctgtcaattaaaaaaaattgtttttaattagctgggtgtggtggtgcacgactgtggtcccagctactcaggaggctgagataggagaagtgctggagcctggaggtcgaagctgcagtgagctacgattgggccactgcactccagcctgggtaacagagcaagaccctctctcaaaaaacaaaaacaaagaaaaatcaaatagccaataaacacaaaaaggtgttctcccttcctgatcattagggaaatgcaaatgaaaaccaccatatatggttggtacctttatacactcaccactgacaaaccgagtagcaagtggaattttcattcattcgctgccgctgggaatgaaagtgaaagtggttcaaccactttggaagacacttttacaatacgtgataaagctaggacaaacaccctgggacccagcaactagaacacacccaacagaaacaccagtacatgttcaccaaaagacatggaagagaaccttcctagtagtactattcctaacagcaaaaagccagaaacaaacgtccatctagattggatgaatcaggaaattgcagtacattcaacatacaacaatgagactacactacttgcaatgacacagatgaaactcataatgttgccagaagaagccagtctcaagaaagaacacacagtacgatgccatttatatgaggttcaagggcgggcaaagctgatctgtggtgacggaagctgagatgggggttagccttggagggttagtgattggaagggcatggggaggctttgggttggggacagctggttggttacacaggtgtgttcagtttttgaaacttcagtgagaagtaacacgatttgtgcacatttctgtatgtgtgttacacttcagtgaaaatcaaaagtaaaaacaaaaaattaaagtagggtaggttctagaacattccttacaagctgattgcttggaccctttcatgaacctgggatccaaatccttgtccaggatttcctgcagtgtcaacactgatctagtccaacctcctcactctgctatgaatattttatttacgtatttatttattattattatttttagacagggtctcactctgtcgccctggcagtggtatgatctgggctcactgcagcctcaacctcctgagttcaagtaatcctcctgcctcagcctcccaagtagctgggattaaaggtgcacaccaccacgcccagctaatttttgtatttttagtagagatggggttttgccatgttgctcaggcttgtctcaaactcatgggcccaagtgatcctcccgcctcagtctcccaaagtgctggggttacaggtgtgaaccaccatgcccagactgctaggaatactttaatcccctcactttaaaggaggaaactgagtatagagagacctgctaggggcaaacagtgtgtggatggcagtgccaggctcaggacacagccctgagggctcagaaagtagtagaaataatggaggcaatgtggcctggcacggtggctcacgcctgtaatcccagcactttgggaggccgagacgggcagatcacgaggtcaggagatcaagaccatcctggctaacacggtgaaaccccgtctctactaaaaatacaaaaaaaagccgggtgtggtgacgggcgcctgtagtcccagctactcgggacactgaggcagaagaatggtgtgaacccaggaggcggagcttgcagtgagccgagatcgcgccactgcactccagcctgggtgacagagcaagactctgtctcaaaaaaaaaaaaaaaaaaattaaaaaataatagaggcaacgtggtgcaaaagacaggcatgtgggctctgctgccttctagctgggcgaccttgggcacgtcatttaaccctcctatgcctgagtttcttcatccgaaaatcagggcttctgtgaagattgtgtcacatgagcacagggcttggcacaacactcaaagccatgaaccacaagctcaggagagggagggagggagggaggtgctctcacacgtaccttgggcactgcaagggccttcttagctcatgtgatcctcccactgcccctcaaggcgagacgcagacccgttgtatagataaagcaatggatactgtagttaagtgacttgaactaataagagcggaggaatgggactgaggtccctctgtccgcagcagagagactactcttaactgccacactagtcaccaaagggcagagtgaggcatctcagctcaatgaagggaatcctcaggaccacctgggtaccctgacaaattctccaagactggggcgagaccagcggctgaggagggcgggcctatgcacagcctcaactccgtgggacttctgcacccccagcttccccatggggcctctctctatctcagcgccagcccatcctgtctcagcacaagatccctgagcctgccccaggggcagcgccagcctgcaccccatcaccagaggccctcgctcccacacccggaccacctctaatccctagcagcatccctcatgggccaacaaggagccttcctgactccagatctggccccgccccttcctgctcaacactctctccccaaggtaaagcacaggacaactgagtccttcagagccccttccccacctgctgccccgcagcccctaggctgcctctgtcccaacactcaccacaaccctctgtacttgctaggtattagtcacagctctaggccctgggatagagcagcgaatgagacaagttctaacccacatcttgccctaggcacccagtttgagtcacatctgaatctccaagtgcctgacacaggtcttgcccagaaacccatgtcaggcaataccagcgaatgaacagggcttgtctggctgtgtacacagaggctgttgcctccctgttcaacctgacaaacacctcccaaaaccccagctcctgcccctcctgccgctcctgctgcctgggatattttctgggcacccaactcctatgcaaccccatctaatgccacctctgccaggaagccttcctccagcctcctaaagctgactcagtccctcctttctttggtagtccctcattgtgggaatgactgtgtccaggtctatctcctccatcagactgggaccgcctcccagtgccacctgagagcacctgactcatatctgtgcttctagaatgtaagggccagcaccatacagctttggtaaatatttatggaatgaataagtgaatcaacccatcaagagataggtgaacatcaggaagggaagaaaaatacaagctcccaggccttgaggagaagcagggaggagagtgaagacacttgaagctcccagggtcacagctcagctctcctgacctcccctccctgacctttgcaccctgttccccaccaaggcccccaactcttctgcctccaggaggcttcagggattgaccgcacaccacagcacagagggtctgactgctcctagccaagcccccagggctccctggggaggctgttaggaggtgtctggtttcccgtctgcaggccatctgtccctccacaacaggatcactggccctgctccagagggactcgaggtccattttagatcaggagttccctagggactgagggaactgctctgcgactcactgctttaggtggccctctaacatcctgcaaaaccctcttgtaaccctctctgaatgtcagcatccacagcgaatagctgacacagctcagagttactgagcggctccctcactaacaatgagtgctgacaggccacggacttggccactgtgaagagcatggctgcctggcatgtccagcctccaggccagccgcttggggaagcctcctgctcgccaggccctgtggatcaccccctccctgacctcctaaggcactggaagcccattgtgcctggcaggagtcagcatggtgcagcagagagggcaccagctccgagcctgacactagctctgccggggactcactgtgtgacctgcttccttaccctcaaaagggggaaataagacaaagctcacaagggtagccgtgaggtctaaagaatgacgcttggaaagggcctagcacagtgcccggtgcagaacaggcaatcaataaatacttgacatacaaaggcccctctgcctctgatttggtgaaatgcaggagtggcacccccagggctacaggacaacgtccctgtctggtgcttgggtactgagaggtctggagcttcagaacacagaggtcaagactcaggctctgaaggattagagacatagcttccagtcctggctgtgccgggtgcttgctgtgtgaccctgggcaagtcgcctcccctctctgagcctcagtttccacaacttcaagatggacactgagttggcattgttgatacatgttgttggcaagggtggcaaaacaactgttctggcaatcatgattcatcaggattgaccagagccagatactgtgcaaagagctgggttaaatctggccctgagggcagtctgctccctccctgctctggcagcatttaggatggtagcaccttgttcacaacctggagttgctgcgtgcaggaatcccagcccccactggcctatgcgctgtgccagccaatgcatccctccacctcacggtgggagctaggactgggctcagggcagcgccactcccaggcccccatctagggccactcaccaggatggttgtgaccaccagggtcttgttggccagtgtctgcgacaggttgatgtccagggtggtggcattcatggccagggtgcggttagagtaccacaccccaatctagggggcagagagggtgctgtcagctcaggccctgcctgaggtcatggcagcctctgggcccgcccccaccctcaccccagcagggctctggcgtcaccctgggtctgctcacctcacggtggccctgccgggacttttctaggatgcgcagggtgtagttggttctctgccctttgctgttgaactcgacccgcccggtcagcccatcatactctacctggcagggtggggaggtggggcagagggagagtgcaggggcccagagatgggcagggaaggcccaacgtggtgagacatccacagagaaaggcacagacagaccggggtggaggggacaagagagagaagaggaagatcacagtcaaaagagcaagataacatgcaaggaagcaagaggagatgggacaaaaggcatgaagagggcaagactcagaaagagagagagagagtaacccagataggcagcaacagccaggagtggacaggggaggcagtgggtacggtgggaagagcagggagggcagagggccacagggtggtcacagtgagcgctcccacctgaggtggccgtgtcctgcctcctccacccatccccgctcgggctcaccatgcgcaggtagttcatgaggctggtcccgtggggccaaatgttggccgatgtacaggccagaggcttcacaccgatctcctggctgcggttcagctctcggacagcgctcaccaccacgtgcacggcgtcaaacatcagggcggctgacagctgcggtgggacagaggcgggggtgggatggataagaggctgcctaggcagaggagccccaaaggcccctgagctgccaccctcaaaccctcaaataacttccctctccccaggaatgggaaactgggtgggtcaggagtgaggaagtggctctggtgtctttcttgggaagtggaattgacagcggggaaggtgtgtgtgcttcccatgtcttggtgggagtaggtctcccagaatgtatgtggccatgtatctctcagagggtgcctggatagctagctgtgtcacctgcatgggcaggtatgtctgtgaatctgggtgatgcaggccagggaagatggccatagtccccgtctgagtgtgtctggggcacgtttacatgagtggggctggacgaccatgcccattcatctatacacagcttgggtgtggtgtcagagaggcaggagcatataatgattggtcgcgggcctgggaggcaggtggctcagagctagaggcctggctctgctattttctcattctttgatagggctaagtcctcattcctccctgaacctcagtttccttctctgtaaaatgaggataatagtaatctctaccttcatgtgctgttacggggctccggtgacataacgcctgtaaagcactcagaacagtgcctggcacacagttagcgtcccatacactctagcccccaatctgtgacacaaccacggtgtctgtgtgtgcttgttagggtgtgccccagctgtgttagtgtgaaggtctgagtatctgtgttgtgtagatgtgcacaggggtacacacaaatgtgcctctgtgttggggtgtgtgatgtccctgtgtggacacatctgactggacagcttggtgtccatgtgtgctctgcgcgtagaagtgtcttggtgtcttggtatctgagtagatgtctgtgaacaaatacacataaatatgcatcttttgtatgctggtatttattcaacatctattatcagacacctgttatgagctaggctgttttaagtgctggggatacaatggtgaacaaaataaacagaaccccctgccctcatggaacttacagtcctcaaatccatatctctatgtaagtctaatatacagtaagccacatcgtgatgaaataagcaaatataagtgctatggaaaaagacaaggcagggaggggtgaaaaaataggtagtttaccttttttttttcttttgagacagagtcttgctctgtcacccaggctggagtgcagtggcacaatcttggctcactgcaacctcttctacctcccaggttcaagcgactcttgtgcctcagccacccaagtagctgggattacaggcatacgccaccacacccagctaatgtttgtatttttagtagaaacaggattttgccatgttggccaggctgatctcgaactcctggactaaagtgatcctcctgcctcagcctcccaaagtgctgggattacaagtataagccaccatgcctggccaatttacttttttttttttttgagacggagtctcgctctctcgcccaggctggagtgcaatggcacgatctcagctcactgcaacctccgcctcccaggttcaagtgattcttccacctcagcctcccaagtagctggattacaggcacctgccatcatgcccagctaatttttgtacttttgtagagatggggtttctccatgttggccaggctggtcttgaactgctgacctcaggtgattcacctgcctcggcctcccaaagtgctgggattacaggtgtgagccaccgcgccgggccaagtttaccattttttaaacaggaggaggaaggaaaaatcttatacctgaggggacactggagcaatgtcctagtgatggggagcaagccactgcttctctcggaaagtgcacaggaagcagggggaagagggtgtgcagaggccctgaggtgcacctgcttggggcatcagaggcacctcgaggagctggtgtggccagagtggtgtgggaggtagagagagaggaggacatgggtccaatgcatcacaaggccacaccacgaggcctcagggagggcgagagggttctgagcatgatctgagtgaggtctgaaagggggccccagaagtatctgtgcagagtgtttctgggtgtgactgggtatctgtgtgctcaccgcagggcccaggtaggtgctggcttcacagttctccctccaggacatgttgaggctgcggacaaactcagggtagaaggggtgggacgtgttgaacatggagaagcccaggatgttggaggagtcctccacaataccgtccagatgcaggatggggaagtcctgggaccaggaagaggtggtgaggcctggggctaagccctaatgggacagctgtgatgggaaggaagtgggggcagagatgggccagagggcatacacaccatggtggtgaggatgtacttgtaaaacgctgaggtcattcccagttccgaggcctggaaaacacaggaggcaaagaggcagagtgagagacagagacccacaggcagagatggggaggactcaagagaagaagagagatttagagacagccctggtgagaagacactccatgggaaacacagtaaagtaataaatgctcagagatagacagacagggaggaggagacaagtgggggcatagggaggccttagtccctggtgtcccgccatgctgactgctgtcccaggtgggacattttgctagaggagagattttgctagaggagattttgctagaggagagaataggactcccaaatgtcccctgtctctcatgaaggcacttagaagatttccttctggagataggcaagaagaagcctcagaaatagggcaggaaggggaattatctttttttttttttaaagacaagatcttgctctgtcactcaggctggagtgcagtggtgggatcatagctcactgaagccttgacctctcaggctcaagtgatcctcccacctcagctcctgagtacctggaatcataggcatgtaccacaatgcccagctaattttttaaaaattgtttttttgtagagatggggtcttgctatggtcccaagctcctggcctcaagcaatcctcctgccttggcctcccatggtgctgggattataggtgtgagccaccaggcccagcagagaggagagccttaattttaagccctacactctccaaaagccaaggttgggctgcaaatgtgtaggactcagcctaggcataaggtcagaaaatcgattccctgcaatctttaaaagtgctttgcaataatagcagccagtttgaacgtcaagattcattcttgagacccttttctcataatcctcgaggaaaacaaagctggaaaaattcttcctgccagaagcacccaagtctgtccccccacgagaattataacattaaagggcaccagcttgcatttcctgggtggcaggagttgggctctcatcacgtgggtgtcagggaagggcaggcttggagagggaagagacaactgttcacacggctggcacgggaggggccgggatcccagcccaggcctgcctggctcccaaacctgaaacctcctccttaagccatcctgtctcaagaacccagtggattctgttcacacttcctgcgggctacagtcagcagtgatatatgggtttgtttgtttgttttttgttttttgagatggagtcttgctctgtcacccagactggagtccagtggtgcaatctcagctcactgcaagctccacctcccgggttcaagtgattctcctgcctcagcctcccgagtagctgggactacaggcgcccgccaccacgcccggctaattcttttgtatttttagtagaaatggggtttcaccgtgttacccaggatggtctcaatctcctgacctcgtgatccgcccgcctcagcctcccaaagtgctgggattacaggcatgagccactgcacttggctgacatatggttttaattaaaaaaaaaaaaaagtagagaaaaataaataatacaaatttggttattggccgggtgtggtggctcacgcctgtaattccagcactttgggaggctgaggcaggcagatcacgaggttaggagttcaagaccatcctggccaatatggtgaaaccccgtctctactaaaaatacaaaaattagccgagtgtggtggcaggtacctatagtcccagctacttgggaggctgacacaggagaatcacttgaacctaggagactgaggttgcagtgagctgagattgtaccactgctctccagcctgggcgacagagcaagactccgtctcaaaaaaaaaaaaaaagaaaaaagaaaaaaaatacatgcaaaaacaccttaacacagagctcaataaaaaatgtttaaaaatccttcagagctacgatgtagccagatctgactcggggccaggcactgccctgcatactttacctgcccctgcccacagccccttctctccccatcactcgctctctgggcttgagccacactgcctccttgctgttctgtacacaccacagtcttgctcctgtcctgcagcctgaacgctggctgttcccttagcctcactcattaaccctcacaacccaccgagcagggactattcacagggagatgcggtgactgctcaggaccacacaaccaggaagcaggcaggctgagagacaaactttacaattatcatcttcacggaagaagaaggtcttgaagcccccttttgactcctgaggcccatgggcattgggtgacttgctcggtcaccccaagtttctggccccagtcctttgggaaatcagaggtaggggcctcaccttacggaggatgaggtgggagatggaggcgttggcgtcgatgatgatggtggacaccttgtcatcacggatctccttgagcagtggtgtggggtcccggctgtcgtccaacatcctcactgacagcgtctccttggagatgaggaagccacgcaccagttcctccaatcgcagcaggcctgagggaggggtggggccttgggttggagcccttctgggtacccaggcatggcgtagacactctctcctcctcaacatggggcagctgggcagaggactggagggtgtgcaaggacatggggcagctgggtcccatggggtaatgggcttggggacccaaagcctgggccctccccaattaaaatcccaacctagacctcttcctagaactccagattcctgtctctgccaccttcctgacccctcattgggtgtcttgacaggtatctcatgcttaatctccttgctcaaccaccacggcttccccatgttggtgaacagcatctctagtgtgccagtcgctcaggccaaaactctggcttcctctctttcacacccaatccatcaaggccctcccttccaaacacatcagatcccctcacgccgtgccactgtcaccaccctgtcctgagccaccaccaactcctgcctgctgcaatccccaagcctgcccctgagtctgttccctacacagcagccagaatgatacgggtcagatgtgctcctcctctgccccaaaccctcaaatgccttcccagctcagtcagagtcctagaggccaaagtcctcacagcctccaaagccacacaatctgcccaactcaaccccttgttactgcccagactgcgggaattcaagaccagcctggccaatatagtgagaagccatctctttaaaaaaaaaaaaaaggtacttgttgagcatgtgctctgtgccaggctctgctcttggtattgggggtcagctgtgagtgaagcagaccaggtacaggatgaggagatgagttgggcaacaaacaccgcaaataaatgcattacatggttagaaataatgagttctatgttaaagcagaaatgagttatgaagactgggagtctagtgtgggtgtggggtgcaactttaaatgaaatggtgggcgggggcctcattgagacactagagtagagactgatccctaatagcctaatatcaagagccaggcctggcacatagcagctgctcaataaataccttttttttttttttaaccatccagcccacagctcctcctctccccatcactcactctctgggcttgagccacaccacctccttgctgttctgcacacaccatagtcttgctattgtcctgcggccttcacgctggctgttcccttggcctagaaccctctcctctcacatccttacacagctccctccttcccctcctccaggtctctattccaacatcaccttctcaatgaggccctcgcccaccatttcatttaaagttgcaccccacgcccataccattcttcataagtcatttctacttttccatagaactcactacttctaaccatgtaatgcacttatttgtggtgttttttgcccaagtcctctcctcagaatgtacttggactacttcacccacggctgaccccaataccaagatcagagcctggcacagagcaggtgcttaataaatacctttatttatttatttatttatttttttgagacggagtctcgctctgtcgcccaggctggagtgcagtggcgtgatctcagctcactgcaagctccacctcccgggttcacgccattctcctgcctcagcctcctgagtagctggcactacaggtgcccgccaccacacccggctaactttttgtatttttagtagagacggggtttcaccattcacaggatggtctcgatctcctgacctcatgattcgcccgcctcggcctcccaaagtgctgggattacaggcgtgagccatcgcgcccggccataaataccttttttttaagagatgggatctcgccatgttgcccaggctggtcttgaactcctggcctcaagccatcctcccaccttggcctcccaaagtgctgggattacaggcatgagccaccacacctggcccaataaatacttcttgaaggaggaattccttctagaggctatggagcacagttcctccttgcctcaagctccatacccacaaatccaccagcctaccagacatctcacatgaatgtctcaaagacacaccatgcccgacgtgtgccccgatgaatcgtgttcctccttggcaaaggccttgcaccatccctagccccaccctcttctttccctcacgcctctcacatcaccctggccccctcattccaactgccaccacctgggcccagaccagtgtcgcctctcccctgcctttcacttgtctccttgccacccctcttgtcactctccagcctgttctctacactgcagccaaagggctcttcctagaacacgaatctgaccctgtcccctcgccctgcccggcgtggggacttcccatggctcccatcatctcttgcttcgttgttctcacatttcagccactgggagtatctgcaagcctcttgaagggctgtgctccctgggccctctacctctgcccgtcacactttctacttagaacctgttccctctttcttcccacacccttcaggttcagcttggatgtctctttctcatagacacaggctctgaacctcccagatggattaggatccctcctatgtgataccagaggctccacgtgcctcctggcagcacacataccactctgtatcacaacagctcaatgaccaatgacctccactagaaccggagttccaagcacccagggaccacgcccagggcctagcagagggccttgacatggcaggtgcttagtcaccatctggggactaaatggatctctttggggagagaaggggtctgtagaaccagaggcctcggtttctgaagatgggagaagagcctggtgcctgggtgccccagggttctaactagggggcagtgaaccactgtgtgggacaccagatctcttgggaaggggtgtctgggggaacagaaaacaaaacattcagttctccctcacactcagccttggcgcagatgaggctggccgaggggtagttgaaggacttgaggattcgggagaccgccaagctgacgtcctcgttactggggtacaggctgacagacgcgaagcgaaggtactgaaggcggggtgtctcctcgggacccaccttgatgtgggggatctggacagagaggaaactttggcctccatcctgcttctccgcccagccctcgcctcccagggacccgctccccacaaagcgccggcccacactccccatctcacctccttctctccacagatatggctcacggtggaggcagatgctgggctagaggagggcccaaggacagacacaacccctttgggtaagatctgacacactgcgtgggaaggggaagagaccgcagagtcagggaccccctgcctcctctccttccccatccctcagggagccgccatggcccaggagaggatcagacactggcaactgcctgatcctcttctgccatccgggacccagaaggccagtctctgaccccacccaacaagtgaacatgagggggcatgagatggagagagatgaggacacagcaacagagggacaggtcaggccaagggagatcaaaggaagggatgaagagaaagagacaccaggggcctcctctgcctacaaagcctgtgcctagtccctcagccactgttgttctcaaccttttcagccatgccacaacccacggtgcactcaccacctcctcccctgaccccacagcccaggtcccctggagccttcccatactccaaacaccactctcccactgcacttacttcctcctctttcttctgctctcttcctccttatacacatgtgtgtctcaagactgggaggtggaaagctgttgtttttgcttgtccagtgcctgttctcatggcagaaccctaacttctcctgggggaactatcctcacccttcagtccagggttcccaggattgactggcacctgatgcaggccttggggagtcacagaactccattcttctagccatggcaactggttcagaaatacatatgggtgcaaatcagaccatggagcaccttccccaggtcttttgctacaattatcactgggtttgctaaactggtgagatgtaagcttggtgctgctggggccatctcaccaccagttgagagagcatttctgaaaatgaagccaactcagaggaaagcaggcctcagaggtaaagacacagagattcccaggatgtcatctgaatgcctgaatccagccatgcctgaaacaatcctaggccatcgtttgaacacctggattcagccatgcctgaaatttgtccttaggtcttttagtgacatgagctaataagttctcttttttccttaaaccaggctgagtttggtttctgccacctctaactaaaggcatcataactcaacacctcatttcctccaaactggctccttctggaccttccacactggtaagggccccaccattcacacagaccagatgcctggaaatggtccttgccttcaatctctctcctgacagccagttagtcaccatgtcctgtctcttctttgtcctcaaatttctcacatgtatccccttctcttcaaccccttggcccctgacctagtttaggactctcaactcagacatatatcagagtacacactcatcacccaaatccagtctccagattctctttccagaagcctcactccctggtatagacctatcaatggcttcccagtgcctgtgggtgaaggtggcatctttcaccctggcactgtagcctccttgagccagcgtgacaatctgcacagcctcgcttcctactaccctgtcacacttagctctgaagtatctcacaatctctccaaatatgtcctgaatccaggtggattcaggatgggctcaaccccatacccccccatttcttggctccaaatacttccctctgctcccaccccgatccccacctcatctccagactctaggcacatgactggaatgccatctgcctcctcaccctccatcccagcttctcccaagttgtactctgtgccacatcagccaaaaaagcctgtgaaatgccataccccattcttcctcttactgatctgaaacatacacgaacaccataaagcctctgataaggcctgcaggaaagaaacctgtctaaaacatgttttaaggcagcatctcccaaaggtctaactccagcacatctgttcaagtgacaccttcgaacattcagcccatcagtattccatagacacttccacacccctgtgatgtggccggccgtgcttggagccacgccactctttctacatcctgttcacctttcagagctcagtttcagactagccttctccagaatgcctttgctgaccctcgcccaagcctcctgccctccatgcctggggcttgttattaagctctgggggctaacaagcatccccagccagctgggatgatagggcttatcttttcaacgccgccccgtgctcctccagagcagaactggggcttatgctctccctcctctccaacccccaggcccagcagcagccatgtctgggaagaaggcagagacaaacacaaagaagggggaggatggagctagaagaggacaaggccaggccagaggccaggggcagagggatggactgagggccaccgacctgccctgcctcaccccacgcccccatggccccgctcactggtgtccgtggtctcgtactggctgtcccgctgcagctcaaagatgtctacttccactcgggccttggctgggacctcgatgatcccgttgatctgctcccgggccaaggccaaggccagacgctcaccgcggccacacactgtctgatcatccaggattgcagctgaggggacacatgggttggggaccagactcctgagtcctgaggaaggagggggctgtggtcttagactccagggctctagggtgaggtgggtatacggaccaggggtctagacacctggatctgaggttggtgggagctaggggtctggactcctgggtcctgggggaaggaggaactggaggctgggattccttgctgctgaagagagctgagacctggaccctgacggactggcatgcctgggtccccagaggagccccagggcctgaggatgcaggggcagggtgcgggagggcctcacccatgcgcagtgatgagagcacctggcagctggggctggcgaaggcaacaatcagcagcagcagcagctcagccggcatcttcctcccctcctcatggggacgcagctgccgcggcccccactcgccacctgcagggagaccccccagaccaaggggagattactatgtggtgggatggaaccccttggaggcctgctggatggggtggtcacagaagccttggggacattgttggcaagcagttcacagctctgcagagccctgctctgtttagaagctggcaatactgagggcattgcaagaagggaagctcagctcagaggggcactaccagggtggaggtcacagtgctcaggcgctgagtaggacaggctgcaagagagaggatgggcacagctaccaaaacaggagggaggcgtgcgaggttctcaggtaggagtgaattcctgggaccagccccacccaaataggaaaccaggaagtgccaccccccacccagtcccgcccctgtctctgggcaggcagccgttactaggcaacagaaaccggctggagaggatgcggtggttgctaggcaaccccatcccaggcctcacttgccactttcctaacatccccagttcccacaatcccatggggagagaggcctggacatccgaggtctggaggagagagtatctgggagttaggaaacttcgggagagatggagagatggagaaaaagagagagaggcacacacagaaccccatagatgaatggacccagagcagtaaaagggggaaaaaaaaaaaaagcaaagagagagaagggaggaaacagagaaagtgaaagagaggcttagagaagggaaagacagagagactcagaaagagagaaaggtcaaaatagatagaaatacaagggaagagaaagacaagacaataggaaaatgggggtagaaatggagagaaaagaggagagttacagggaggcagggagaggactaggagggagaaagagggaagagacaggaggatgaggaggcaagataaagaaaggacagagcagggagcggaggaaagaggggcaggctggaggtggggaaaccaaggcacaggcgagacacaggaagagggagacagaggatggagaaaagataggaaccgactcggatacaagcaggaagagctggaagggaggagtgagtaaggcagggagtggagctgcctgccagaagtgggtgccataccactgccccccaccctactggggagaagaagtaaagggggagatggtgcatctttgctcttcacaactctccacccctaaggagtcagggattcctctaggcaccccagctttctgcagggcaaccactgggcaaggagtttggccagatgcacagctccacttcccctggctgagggctgtgccccacgggaagggatgcttgggtttccatggagtagggttactgtggggggcacagaatgctgtgaagtgggcctggacaccggaccccactcagtccccatggaaggacagcttgagctggtgaaactgtggaatgagaacttcgagggaaggatagaggcacaagtccttctcaccatctcaagtggcctgcaaaacctaggctggggatcagtcccagctctgcccctgactcactgcgtgatcttgagcaagtcactgccttctaggcctctgagaagaagagagtgctaggtgggagggtatgctggacaggctggggactgcaaactataatgtggattaaggtgaaggcttgtcaaggatggaggcacaagggatgctgggagacccggaggagcgctcagagtgggaggagtgtgaagggcggagctaggagagaggcaggagtggagtgggtcatcctgagacaccagggactcctggggcaaatcagggagcagaggacaaaggacagaaagaccgagggagagatgggacagaaggacagggacccacaggtggcagccaaaggtgggagcagacagagaaagacagggttgaggggcagcaggtggacacagagatacacacagaaagacagcccaagacgtaggaactgaggctaagtgagagagcaagagacagacacagcctagaagtgagacagcaaaggagacagagacagggcaggtagggtgtcaggcaggtccaggactcagccccagagactgggcaaagccagataaaagtcaaaacccagcagagagctgagcaacagtgggcataggagagacatcagcaaaggtgagaggcaaggagggccagcgaaggcacacagggtgagggagaaggcaaagggagataaagaaacagcagcaggtacaagacttgggagaaggaaagaaatggccaaactctacaaagagagagggccagtcggaaagagagacagtatgtcggagctgcacgacaggcccatagaagaggaaggggcaagggggaaaagcacctgggagagagaaagggggagtcagggagggaaactgaggtggggagatggagtgagtgcactagaggggcacaggcagggacagggcaagcacctgcaggagaggccagacccacacagaggcatagccaccccaagacactcaggaatgccgtgtgggggagcaggagatcctggggcctgaaagcccccagacatggagaggaatgggagcagaaaggccacgcgaggtaacacagaagtcgggagagagaatgggagtggaaagagccagaccagccaggaaaagtcagcatggaccacggagaggtggggcagcagctgaggagggagggactgaggagccgggcacccagagtggatctgggggaaagaggtggaaaagtgacagagggaagacagcctccaagctcagaggcagagagagggaggaggacaggtgagcggaggcacagaatagaaagagaaatggaaagagacctgccgagggagacttggaaagagggaagccagggtggaggagttctgacagagagagggatctaaacagagacatgccgagagcaacctgggctaacagcaaagagagaagttgggcagagtcagagaggggcccaagagacacaggaaatgggggctcaaaagcggaaagacatatccaggagatagagactggacggggtggggacagggccaaggcccaccgcaggcagaggatgaggctcagaggaacagaaagagccagtctgggaccaggacggaggcttggagacagcaggggcacggacatgccaggggcccggggtaagtgagagcccaagtaagagcaatcagccccgtaggaccccagaaagctagagggccaggggcggcagtgagctatgtacccagaagaagaggtgagaagaggtcgaggtgaatggacgctgaggagatggagggcgcagagcaggcccctagtgggggagggtacttgccagtccggagaacggggagaatgtggtgcccccctgccaggcggcaccagagcccagccttccaggacccagaacccagcccaatccctgccctgcagacactcacggatcctggtgggacggagggctgggctccctcgaggcccgaagaccgacagcgggaggtgctctggcgctgggtggtggtggggctgggcggggggagagggcagtccacagggccccctcccccgccgccggtggtggctcccaactaatccaaaacggtggctccacaggagcagggaggaaggacaggtggaagaggagagggcgggccggggaggggaggaaggggaaaggagaaaatggaggagagaaggggagagaggagagggggaaggagcaaatggaggggaaggagggaggaaaggaggagaggaaggtgaaaacggaaggggggggcacaggcaaagccgggggagggggaagctggcccaggaaagggcccccgccccctcccctagccgggccggcctgggggggccacagggggcgaggactgggtggagaaaaggaagccggccatcaggagaagtgggggaggggagggcctgctgggggagggggccgccccctttccccctcccccctggagcctgggccctgccctggttgaggcaagggcccggagtcctcaagccctcagcccccacgggaaaagcatgctgggggcggggagagcccgggagtggagagctggggaggatggagagctgggagacccggagaggccaagaagggggcaaatgaggtggagagatagggaggagggagaggaggatggagaggagcaggtggaagagaaaggcggaggagggtggggtgtcccaggggctcccggtgctgggcctcagtgggagggcctggcgacacactcctggtcccctgtgaggagccggctccagtccccggctccagtccccggctgggcctgcctccctgccgctggctgccgccaccgctcagtctcccctccgaggccgccgcctgcctgcccgcctgccgcctgcgctgggtcctggagcgcagtggggtggttcaggagagagagaagagggagggagggaggcagggaggagggcgggcaggaggaagggagggaggcaggcaaagagagagtagggaggtgagtcgggggagggggagcctgtattggttggggctgggggccccccgcgaggagaatgctgatgagaagaaggagctgcattggatggaaggcccacccccgagccaccccctctaccacaccatgccaccgccctgcccaggcagccctgggcacaggagcccacagagatgagaggcaagaagacccagggagaaggccactgagatgaggggagagggctacagagatgaagagaaatgaagagaagagagacagccgtcaagactgtccagagaagtgggctgaggcccacaaaccccacaaggacaaggacaggaaaagcccagggataagaaagaaaggcccatggagacaagggagcagcctacagagacaagcaaaaggacctcggagacaaggggcagtaatgtggacatagagacctcccgcgaaggaaaacgggagaagccagagacacaagagagaggcccctggaaacagaaagcactcctcagatatggggagcggtccacagggcagggagagagccaaggagagccgaagaaggtcacagaaacaagggaggcctacagacaccagggtaccaaaaagacaaggatgtggctcatagacacaagagagccactgaggcaggagctgccagcctggagatgcggggcaagcctcccccaatataaatagctcctatagaggtgaggggatgggtggtgagtatgagaattccctatagtgcacagagaaatccttgggacccacagagatgagtgggtggagagaaggggccctcattctctagtcacaggagcagagaggcagtgggaaaggtggatgggacaaggagaggaagctggagggcagagccagaagtgggagactccttcccagggaacaccctgcagcctctcagaaggagctgagcaggacagggggatggaagagagaagcgacacagatcttggagtgggggtgggtggtgcatggctgggtggggggtgaaatttggggggaagaaacatgacagttggcgccgaaggctgagcccgtgactcaccaccacccccgatgctcgtgatggggaggagacactgacacactcacgtgcggcccacagcatatgtgaccgcatgcctcgaacacacagctggcacatggcaactcctggaccacatgccagcccagcacaggaagccctctgcaagctggcatgtggggcatcctggacacacatctgacacatatatctgacgctgaaggaccaccaactttgcacacacctccttaccccacttggtcaacatctacaccgccccctcaaacatccacacttaactccagtcaggcctaaaagcccagattcacacctgcctctgggactttgcttatgaaggacctcaacacagaacaccatcctttcgaccagggcggtggctcattcctgtaaccccagcactttggaaggccggggcaggtggaccacctgaggttgggagttcaagaccagcctggccaacatggcaaaaccccgtcactactaaaaatacaaaaattagccaggcccggtggcacactcctttagtcccagctacttgggaggctgaggcacaagaattgcttgaacctaggaggcagaggttgctgtgagccatgatcatgccactgcactccagcatgggagacaaagcgagactccatctccaaaaaaaaaacaaaaaacaaaaaccaaccaccatcccctctaaattcaacctgtcccggaaatcccagccagtcctgcactaccacctccagaaagacctcagcttatcctcagcttattcctatatgatctggagaaaagagacctgcaccacccaaatcaagttgagaagtccaagcaaaaggcctgagaagttacctggatcctcaaattttctttttttttccttttcttttttttttttttttgagatggagtctcgctctgttgtccagactggagtgcagtggcatgatctcggctcactgcaagctctgcctcctgggttcacaccattctcctgcctcagcctcctgagtagctggtactacaggcgcccaccaccacacccggctaactttttttgtatttttagtagagacggggtttcaccatgttagccaggatggtctcgatctcctgacttcgtgatctgcctgcctcggcctcccaaagtgctgggattacaggcgcaagccactgcacccggccaggttttcttttcttttattttttctttctttcttttttttttttctttagatggagtttcgctcttgttgcctaggttggagtgcaatggcgccatcttggctcactgcaacctccgcctccggggttcaagtgattctcctgcctcagcctcccgcgtagctgggattacaggcatgcaccaccatgcctgactaattttgtatttttagtagagacggagtttctccatgttggtcaggctggtcttgaactcctgacatcgggtgatcggcctgtctcggtctcccaaagtgttgtgattacaggtgtgacccaccgcacccagcctgatcctcagattttcaagtggggaaaaggaggtttcagcagaagcaagaatctgcccaaggtcacacagcctgtcaaaaactgagcatggcttccacttctctgtcacctaccccaggtgattttgccctaagggcaaacccagactgcttcagagcaggccgagcctagctttagctcactaatttccaccaactctttcctccacttcttgcattcaacccttcaacatgcaaccacttgaacttcctgcctggcaggcaggtgagcctgggggccaagaatgtagactgtaaggtcaactcctgggttggaatcctgactcttcctaactatgggaactacgactagttacttctctggggcctcgatgttttgtagagtcagcatgacagtttctctctcatagggttgttgagaggattaaactgagtaatgcatgtaagcattgagcataatacctagcacgtcataatacactcaagagatgttagttattattattaggctcccggagatactaataaaaataacaactggccagacacagtggctcacacatgtaatcccaccattttgggaggccaagacaggaggatagcttgagcccaggagttctgagaccagcctgggcaacatagtgagaccctatctctataaaaaaaaaaaaaaaacccgggcatggtggctcatgcctgtaatcccagcactttgggaggtcaaggtagatggatcaacttgaggccaggagttcgagaccagcccagccaatgtggcaaaaacccatctctaccaaaaactaggaaaaattagcagggcatggcggtgtatgcctgtaatcccagctactcaggaggctgaaaattgcttgagcctgggaggcagaggttgcagttagctgagatcacaccactgcactccagcctgggtgacagagctagactgtctcaaaaaaaaaaaaaaaaaaaaaaaaaaaattagggactgggcgcagtggctcacgcctgtaatcccaacactttgagaggctgggtgggggggtggatcacctgaggtcaagagttcgagaccagcctggccaacattgcaaaaacctgtctctactaaaaatacaaaaattagccgagagtggtggtgtctgcctgtagtcccagctactcaggaggcttaggcaggagaatcacttgaacccaggaggcggaggttgcagtgagctgagatcgtgccactgtactccagcctgggcggtgggcgacagagtgagactccatctcaaaaaaaaaaaaaattaaattaaattttaaaaataggccaggtgcagtggctcacgcctgtaatcccagcactttgggaagccaaggcaggtggatcacgaggtcaggagattgagaccatcctggccaacacggtgaaaccccgtctctactaaatatacaaaaattagccaggcgtggtggcgagcgcctgtagtcacaggtactcaggaggctgaggcaggagaatcgcttgaacctgggaggcggaggttgcagtgagccgagatcgcgccactgcactccagcctgggcggcagagaaagactctgtctcataaataaaataaaataaaataaaataaaataaaataaaataaaataaaaataaaatgagtaactcctagatgtcttttactctctgcctcacatgagatgaaatggggctcacatgaaatggggctgttattagccccatttcacagattagaaacttaggctcaggacagttgacttgccctagaaccaggattccaatccgggaatctgttttaactatacatgcctggtgttagggaatttaatccatgagaaggttaggacatctagtgaccaaatggccatagaattggccccgggtctcactgtgagacgcatcccatagtggcttcaggtaagtaaataaataacacaattctgagagtcagtttcctcatccgataagttgaaattcctctgtgtttgggttcaaggagtaggtctggaaatgtttcttttcttctttcagatggagtctcgctctgtcgcccaggcgggagtgcagtggcgtgatctcggctcactgcaacctcggcctcctgggtgcaatcaaatctcgagcctcagcctcccgagttgctggggttacaggcacgagccaccacgcccagctaatgttttgtatttttagtaaagatggtagtttcaccaggttggccaggtgggtctcgaatgcctgacttcaagtgaacccgcctcagcgtcccaaaatgttgggattgcaggcgtgagccaccacgcccagcctggaaacgtttctaacagtactggggcaactccctcccaaggccctgaggggcgcaggaacgaggtgagtaggaatggccagagccccttggacacatggggccccaatctcgaggtgtaagggtcagagtcaccccggaaggaggtggagtggagtccgcccgttaccggctcacttccttcaggctctcaccccgattgtccttcaggtcctctacccaccacactccctatttcttccaatgaaattgtccctgcttctttttctccatatcctcgctctccttgcttcccctatgacatttctcctctctccacctcccaaaagtcccctcggtcttttctctgtttcttcctgttgccttcattcccctccttttaataaagtgagtctggaaccttggtttcccttttctctctccatgtgactggtgctgcatgcagtttgccctctccccatcgcgctaagtggtttcactttctccctctgaccctcggggaaaccacaaaggttcccgtgcctccattcccccgctccagccctcaaggtgccgcgtgcctcaatttcccaggctcttttcctccctctccctgtccccaacgctgactccctcacggcgtccccaaaatggcgcccgcggccgcgctccgccgcctaacgtcatcgcgccgccctccgctcagagttcccctctggagccgtcggaggcggagtcgaggaggaggaggagcatcctctaaggaggattaaaggggcgggcactatccacccgagggctgaccggtgagggaacgacgctaaaggattggttgggcgctgcggggaatctcgacgctcctcactattggcccaagcctcagagacatgaacgtcgattggccgaacggcagggcccgagcgggcaatgattggttgcgtccggccgtccgtgcggcggccgaggaggaaggtgggaggggcgttgctgagggtagctgggggcgagagcgaggctacggagcaggcgagaggcgacggcgagagctagagcgggcgcagcgttagggtggccgtgcaaggggagccgtggcccgggcccggggcgtgcgagacggcggaagcaggtgagcgcgagcgggcgcgcagaggccggccgggctgcgctccctgccgccgcggcctcctcttgccaggtcgcctgcgcactgagggcctgagggggtgcgcgccgggcagttagggcggagcggcaccaacggccgacccggcgcgcgggcagccgggcgggggccgggctggagcggcgggtggggaaggggcctggagtcgcgtgcggggctgagtgaggaggggcggggctcgggctgaggctttggtggggcacctgggcgggaaggggaggcctcagagctgtcccaagagggctccgcggctccccagggtttggggtaaaggacttggtggtgtggcaagtccaggacgaaggggctgggccggttagacggcacgtgggtgcccagttaggggcttagggcgtgagaaagataattaagttaatgcaggggaaaaatatctagttcttcctggaaagaattggggcggtgagaggggttttggtgtgaagacattaggaaatcgatatccccaagggaacggtttagagctaaggaggggtccagttgtaatggatggggttaaattaatgtgaagaggccttaaaccaatgtgtcaggaggttgggtacccttggaatgcgtggaaaggagtctttgtacaaagaaggattaagtgtattttaaaagggtgtctgggtgtccctagaatgagctggggaaggtagtcttttttaagtacaggtaattaggccaaggtgaagatgggatttggttattggaaggggaggaagtagggtgggagagatctgtgtgctaaagtgaggggtgcctgggaattcctggaatgagactgagaggttgctaagacgctggggggtctgagtacccccagaataggaggctggtgagaggggcttgagtgtgaggaagaggggtctgtgctggattaaggtggtgatggaggttctgtatgagaataggaggtccgggtatccctaaagggggtttgggcagcacgaggggtgtgtgtaaaaggagcttaagccattgtgaaagatgggtgtgtggatctttacacaaagaagaggagttatgttgctacgaagaggagggtctgagcatccctagaatgggttagggtgggttgggtcttctagcaaattaaaaaagattaggttaataatgtggaggaggatctggatattcctgagatggatttgagggggggctctgtttgcaagagaggcataggttgatataaaatgagggtatgggcatccctgaatgagtggctgtgtatgaacaggaagggtttaaatcaatgggaagaggggatctgggtatctcagaggggattagaattgtcgatttggtcttggtacaaagaagaggtgatgaatgtaaagagtggatagataccctggagacaggagctagggtggtggaagggcctaggtccgaagcggggaggagtaggcttttgtgaaaatgggtctgggtattctggatagggggttagggttgtaggagagggccttgatttgtagaggaggttaagtaattaaacagggctgcgtatcatgaagtggttaaggtgggcaaagtctgggtgtggagatgggttaggccagtgtgagaaaatttgactggggggaagggatatagtttgacgtgaggaatctgggcacctgaggaagagttggtgggtagcaggggttgcgtgtaaaggggaggggtggcaccttgtacagtgctgaaagtggagtggtggggcattgggcagtttgagtggtctgagtgtaaaaagaagtctgagaacctgggagaaggagcagaggccatgggaggggtgtggctgggagaaacaggtggggaaggcctatatggggtttcagttgggtaccttggagaggaatggggtgaggtgagttggtaagaaaaggagtcagtggaaggaggtctgagtggaggttcccatgtgctgggcggaactgtggggcccactgtgaggtgtgggagatgaggggactggacaggttacaaggatctggtgggtggagtttgatgcaagttgatacagaggtgagactgtgggtaaattcctggggaagggactgcctgggagatttgtgtttggtgtttgttatgctgaggggaggaaggattattgggagggaggcagaattttaaaaatcgaaggaagaacttaagggggtgtagatctaaggtattaggagtggagagtgatgaagggaagagctgaggaatcggtgacctaactggtttgtccccactgtctcctcttccagcccagggccttgctgccgccatgactgaggaatcagaggagacagtcctgtacattgagcaccgctatgtctgctctgagtgcaaccagctgtatggatcactggaagaggtgcttatgcaccaaaactcccacgtgccccagcagcactttgagctggtgggcgtggctgatcccggagtcactgtggccacagacacagcttcaggcacgggcctctatcagacccttgtgcaggagagccagtaccagtgcctggagtgtggtcaactgctgatgtcacccagccagctcctggagcaccaggagctgcacctgaagatgatggcaccccaggaggcagtgccagctgagccatcacctaaggcaccacccctgagctccagcaccatccactacgagtgtgtggattgcaaggctctctttgccagccaggagctctggctgaaccaccggcagacgcacctccgggccacacccaccaaggctcctgcccctgttgtcctggggtccccagttgttctagggcctcctgtgggccaggcccgagtggctgtggagcactcataccgaaaggcagaagagggtggggaaggggcgactgtcccatctgccgctgccaccaccactgaggtagtgactgaggtggagctgctcctctacaagtgctctgagtgctcccagctcttccagctgccggcggatttcctggagcaccaggccactcacttccctgctcctgtacccgagtctcaggagcctgccttacagcaggaggtgcaggcctcgtcacctgcagaggtgcctgtgtctcagcctgaccccttgccagcttctgaccacagttacgagctgcgcaatggtgaagccattgggcgggatcgccgggggcgcagggcccggaggaacaacagtggagaagcaggcggggcagccacacaggagctcttctgctcagcctgtgaccagctctttctctcaccccaccagctacagcagcacctgcggagtcaccgggagggcgtctttaagtgccccctgtgcagtcgtgtcttccctagcccttccagtctggaccagcaccttggagaccatagcagcgagtcacacttcctgtgtgtagactgtggcctggccttcggcacagaggccctcctcctggcccaccggcgagcccacaccccgaatcctctgcattcatgtccatgtgggaagacctttgtcaaccttaccaagttcctttatcaccggcgtactcatggggtagggggtgtccctctgcccacaacaccagtcccaccagaggaacctgtcattggtttccctgagccagccccagcagagactggagagccagaggcccctgagccccctgtgtctgaggagacctcagcagggcccgctgccccaggcacctaccgctgcctcctgtgcagccgtgaatttggaaaggccttgcagctgacccggcaccaacgttttgtgcatcggctggagcggcgccataaatgcagcatttgtggcaagatgttcaagaagaagtctcacgtgcgtaaccacctgcgcacacacacaggggagcggcccttcccctgccctgactgctccaagcccttcaactcacctgccaacctggcccgccaccggctcacacacacaggagagcggccctaccggtgtggggactgtggcaaggctttcacgcaaagctccacactgaggcagcaccgcttggtgcatgcccagcacttcccctaccgctgccaggaatgtggggtgcgttttcaccgtccttaccgcctgctcatgcaccgctaccatcacacaggtgaatacccctacaagtgtcgcgagtgcccccgctccttcttgctgcgtcggctgctggaggtgcaccagctcgtggtccatgccgggcgccagccccaccgctgcccatcctgtggggctgccttcccctcctcactgcggctccgggagcaccgctgtgcagccgctgctgcccaggccccacggcgctttgagtgtggcacctgtggcaagaaagtgggctcagctgctcgactgcaggcacacgaggcggcccatgcagctgctgggcctggagaggtcctggctaaggagccccctgcccctcgagccccacgggccactcgtgcaccagttgcctctccagcagcccttggaagcactgctacagcatcccctgcggcccctgcccgccgccggggtctagagtgcagcgagtgcaagaagctgttcagcacagagacgtcactgcaggtgcaccggcgcatccacacaggtgagcggccatacccatgtccagactgtggcaaagcgttccgtcagagtacccacctgaaagaccaccggcgcctgcacacaggtgagcggccctttgcctgtgaagtgtgtggcaaggcctttgccatctccatgcgcctggcagaacatcgccgcatccacacaggcgaacgaccctactcctgccctgactgtggcaagagctaccgctccttctccaacctctggaagcaccgcaagacccatcagcagcagcatcaggcagctgtgcggcagcagctggcagaggcggaggctgccgttggcctggccgtcatggagactgctgtggaggcgctacccctggtggaagccattgagatctaccctctggccgaggctgagggggtccagatcagtggctgactctgcccgacttcctctttggcacctccattccctgttgctgaaggccctccagcatccccttaagcatctgtacatactgtgtcccttcctcttcccatccccaccaccttgtaagttctaaattggatttattctctcgtgaggggggtgctctggggtccttgacacacataaaggtgcccccccaccttccacctcttagcactggtgaccccaaaaatgaaaccatcaataaagactgagttgccagcagtgtgtagagtggaatttgggagtcatgggtcttacctctcgtggctgcatcaccaacacccagaagtgggcctggcaggtattaggggtagtaggagctcagtaaacatttgctgggctgaagagaatgacctggtgttcatgggcatggctctcatagcagggccttcacttcactgctagatggaggtagcatggctctcttgccactagaggtcccatggctctgtggaaaagctcaagagtgtttgtactggtggcaggaactttcagagaaatcagatttttacactcctgtccctgactcctggcctgatgtggaccttgtctcccaaggccatctgattttctcattgatccccaagagcaaatgcaggtaggcatgatctctagagctgtggaattaaaggagattctgaataatatgtgtctggatgtaggaagattcatgagaggtggtgacttgaattcccctggagttggactttggctcagccaacagatttttattgtgagtgatggattgttgggatggctggctaatgtttgaacatctagtcagtctcaagtactatataactgaataatattcacactgattacgtgagaacattttgcagggaaggaatctccagtcaaaagcattgagatgacttgcccaaggtcacattcaatccaggcagggcagagcttgaatttaagcctgatttcatttcatttggtttaatcaccgatatgcttttctctctactctgttgccttctgcatactttggggagggtggtagagacaagatgggagtatgtgactggtgggatgctaggctgctgtgctagccttgcttctgagacccccccccccaaagattattccagatctttctgttgaactctttttcctttttatttttgagttggagtctttgccgcccaggctggagtgcagtggtgtgatctcggctcactgcagcctccacctcccaggttcaagcgtttctcctgcctcagcctcccgagtagctgggattataggcgcgtgccaccacacccggctacgtttttgtattttcagtagagacggggtttcaccatgttggccaggctggtctcaaactcctgacctcaggtgatctgcccacctcagcctcccaaagtgctggaattataggcatgagccactgtgcccggcctgaaagaactccttttttaagacagggtctcactgtatcacccaggctggagtgcaatggcacgatctcggctcactgcaacctccgcctcctgggttcaagcaattctgcctcaccctcccaggtagctgggattagagctgcgcaccaccatgccaggctagttttttgtatttttagtagagacagggtttcaccatgttggtcgggctggtcttgaactcctgacctcaggtgatctacctgcctcagcctcccaaagtgctgggattacaggcatgagccaccgcgtctggcctaaaacaaattctaataattgttcttgtaaaataaatgacataacatttgaaaagttaatgtattagggttctgtttatacaaaaaaaaaatcaggttatgtgcgtgtgtgtgtatgtgtgtatcctacctgttatatgtatataaattacacaatagatacagtaaataatatatatgtatataaagatttttttatagtttgttttactctatagacatacaaacatacattttaatgtttatatacatatatatagttccaaatcctaggatttggagtattctttttaattaagttctagggcacatgtgcagaacatgcaggtttgttacataggtatacacatgccatggtagtttgctgtacccatcaacctgtcatctgcattaggtatttctcctaatgctatccctccctagcccctcaccctctgacaggtcctggtgtgtgatgctcccctccctgtgtccacatgttctcattgttcggcttccacttaagagtgagaacatgtggtgtttggttttctgttcctgtgttaggttttatttttatctttttattaaaaatggggtcttgctgtgttggccaggctggtctcaaactcctggcctctagggatcatcccattttggcctcccaaagtgctgggatgagaggcatgaggcaccacacctggcctgtttttttctatttttcagagtctcgctctgtcacccaggctggaatgcagttgcacaatcacagctcactgcagcctcaacctcctaggctcaagtgatcctgtgatcctcctgcctcagcctcccaagtagctggaacgacaggcgagcaccaccacgtctggctactttattttgtagagatggcgtcttgggttctgtttggttctgactgtgccaccttgaagatgggcctgaaccaaatgatcttcctccatgtactatttttatgtcccatccctgttgatttgttttgagagttgaggggctttgctttctttgtcttgccaaaacactgcaatgctgacactttttgtcttactaaatatgaaacctgtctttcactctattcctttttcctgtgcctcagttcccccaaccctcactatcgactttgcaggatcccagcacctgtgtgccaagcatacattagaggatggaacagtgctgaggaaacgcaacagcttttttttttcctgagatggagtcttgctctgtcacccaggctggagtgcagtggcacaatcttggctcactgcaacctccacctcccaggttcaagtgattcttctgccgcagcctcccaagtagctgggactacaggcgtacaccaccacgcccagctaatttttgtatttttagtacagacggtttcaccatactggccaggctggtctcgaagtcctgaccattataatgatccacctgccttggcctcccaaagtgctgggattccaggcgtgagccaccatacctggcccaattttgttcaatttttgtagagatggggtctcactgtgttgcccaggctggtgtcgagctcctgggctcaagggttcttcctgccttggcctcctaaattctagggttacaggcatgagccaccacacatagcctgttttttttgtttgtttgtttttgagacggagtctcgctctgtcgcccaggctggagtgcagtggcacattctcagctcactgcaagctctgactctgggttcatgccattctcctgcctcagcctcctgagtagctgggaccacaggcgcctgccaccatgcccagctaattttttgtatttttggtagagacggggtttcaccgtgttagccaggatggtcttgatctcctgacctcgtaatccacccgcctcggcctcccaaagtgctgggattacaggcctgagccactgcacccggacttttttttttttttttttgagatggagtctcgctctgtcgcctggtctggagtgcagtgacacgacctcagctcactacagcttccacctcccggattcaagctattctccagcctcagcctcccgagtagctgggttacaggcgtgcgccaccacgtccggctaatttttgtatttttagtagagacggggtttcgtcatgttggccaggttgatcttgaactcctgacctcaggtgatccgcccgcctcggcctcccaaagtgttgggattacaggcatgagccaccgctcccggcatttttgtttgtttttgggtgttttttttttttttttttgcatttttttggtgatgtgaaaaaatgacatataactcttctgttaatttatttgactatttgtgaggttgaaactttttaatgtgttaattgaaactctggttttaaagagtctctttagtcctctggggaagcatccagggatggaaatggagaggtatttgctggtttcctggctttctcatagttctcatatattgaagacagtgtgctggagctcagtcctaagcactttacttagaccatcatcctacaaccttgtgaggtaggtattgtcccttatttacagatgaggacacagaagctcacatattgaaggtcatatatttataaaatggcagaactgagatttgaattcagaagtatgaattcatcctaaattcaaagacttggttctttggcaagaacatttgtgcaggttttacttccaaacattcactattttttaaaatttaattttttttgtttttgttttttttgttttttagacaaggtctctctctgttacccagactggagtgcagtggcacgattacggttcactgcggccttgacatcccgggctcaagcaatccttccacctcagtctcccaagtagctaggactagacaacaggcacatgccaccatgccgagttgagtttttggggcttttttagagaagagttctatgttgcccagactgtgaacattcactattggaacagaagtaaaaccctcccctccccagcatacagatctccaaccccacaccctgatttcttcaccactcttcccaggacagagaggagaccaagggagagtaggcatcatttctctctgtacagtttttaattttttattttttgatgtttgttgttcagatgaatgacacactcaagttacaaaaatggggccttaaaagaagcacattgtacaatgaacaagcagattggagttaagaacactgaaacactaacccgctaccacgagaagagacggagggggtacaggaagggaaggaaggggctaccaacacaggggtcagacggaactgaaagggaggctaacttggtaaggatggaggaaaggcaggtctactccagggctgatttctggatgccggttcctgggcacccttgccttgtacttgccaccccctccaacttcacccacccccattccaacctggtcattctgggtggtgaaagacacccacaccagaatgggctgcgccaatcaggtctttaccaagtagggtggtcaccttgccctagtgcagccctggatttggaaggtgatggtggaagcagtgggacaagaggccagaaaggagttgaaagttcaggcccctgctcttcccaaagactcctcgcccattccccaccctgccattatccaaaggctctctacgagttgccgagagaggcccccagtcaccctgcaattatataaataaataaatactgagcccctgggtttgggggacatattgggggaggggcagcaaggatagaggacaggaaagagaggaaggggagggaggcagaagggaggggtcacagacatagtaaatagttgtctccatcccagcaacacttctctctggatttttctctccttttgtttgtttaacaaggagctaacaattcaaggacaaatacttaaaaatatacattattttttctttgtttccgcctttgtcatcgtcgtcttgctttggagactgctgaggtcaaagtttaaaccgcatgaaggacttgcggcttggagtttttgtgtatttttttttatttttatttttaattttttttcactttttttccaacatataaaaaggtagcggagttgtctgtgggtttttttttttttttaaatggttaaatctttggtttgtttcttttttctcttggaggcctttatctctcgcacttgcctttcccactcagagaccagtgggggcccgcgtgtctcaatcttgctgtctgtctcactctctctctcactcaggtccccctaccctgggctagaggaagagagaggcaccctggtgttcatgtgggttagaaaaactagtcaggtcaagaggtcaccctgacttggctagtccctcgccagatctccccagggcttggagagcccgtcatggccttctccagggagatggatggaaaactcatatccttcccctcctcctgatctcagccccaactcctactggggcttgggttccccatccctacccacccccacacacacacccaccccaccccccagaagagaacagagagaggtggtttagttactggcatcaatttttttttttttttttttggcacaatgaaaaggcccaccattagggtagacccagtctctgtccctcccttaagtaggaggtcagggttggggagaagagaaattcagagggctccccactgctccaacccactcatctctcctctctttctagcccaggcccttggcccccaacctcggacatctaacctagcccatagcctagcctggggttgccctccccatcccccacataaagctccccagccctccaactctctcgctcatacacagacacacggacacaggctctgtacagaccacaaaataaaaacgatgagatagttttgtttcccggagtcgagacgggggaccagagtgtaaggggcagatgggggtggggggcatgaattcccccatcaccttcccaaccctggctccctccagccccccagccccttgccctggctggcccccagccaacgatatttggtttcctttttttaacattaaagttctatgaggtatttggtgccttatctcgagtcctcaggggaggggggcccagggggagacctggggctcacctgcccctccctccctcctacccccttcccaatatttggtttcacagctgtagttaaagcttgggatttggttatttttccccctcccaggaatttttttttcttgtttttcttttcctaggtgtgagggttggatggggagggtccccagcacccccggctgcacaggggtccctccaccaacatcagggcatctgccccatccctgccccctgctcctcctctcctctttaccccactcccacatactggggtggggagaggtcccaggtggtgggacttgatggggaggaagcaggatgaagtgggtggtggtgagtcctggattttctttccttttttttttttttttttcctttttggtctagaatcatagtttttgtttgagtcatctccaccatgccttccatgctgcctgtcttctcggagggggtttttggttgtaattcctttcattttgctctgctcaaatgtccttcctatttggtcaggagcccttggccccctctccacccttgggctggggcccaagccctcttgccagtcccttctctcttcaggaaataaacatggacaaactcagaggtagggtaagggcagggagtcgttcagcggagatgcttacattccggtgaggttgggtagacgaggtgccaggccccatcgtgccggggtgggaggggcggctacttcaccactgcccggacaaggcacccagaggcccctgcaatggccgagtctctgctgcctccgtcgcccagcccaacagtttcatttcccgggtgggagaagggagacaaggaaaaaagagaacgctgaggcctggagctccatctgcctctcctcagagtgtccggcagaaagtggaagctgcccaggccaaagccctgcggtctcagggctctcctctctctctgctcctgcccaacaaggggcaggggccacactacggctgtcaggccccaccctgatttcaatggctcgtgtccttcactgcaacactttggtttgaggagagacacagaaagaacaagattgagagagaagagaggagagcaaagggagagagaggagacaggaaggaggagaggagagaggaaggaggggaggagagaggaaggaggggaggagagaggtcagacaaaagagaaccgaaaaagaaatcaaaggaggaatcaaaccacccaaaagttgttaagttttccttcatctgttctttttgctttcttactcctttttttcctgtctttttttaaagctttttcagttgatttgggaggggagtttggggctcttcacccctgtccctgataccctctctcagccccgcccacccgcttccatctgccctggccgagggacaggccctgccccagccgccccctccggctttcccaaagacaacgtccatgaggtatttgtgaagagaaagaagcatccgtccttccatccgccttggggaacaagggcctggaccaccggtgcaggggcttggctccgcctcgcggttccatcttattcttgaagagtcctcatcttctttcccttttatatatatatatatatatatgtttatatatatatataaattttttttctagtttaaatttattgtttgtttgtttctgtttttttggttttcggttcaaaactttgttggcctccacaatagcaggagggcagggtggctcccagtggtgtctctcctctgtccgtcgtcagtggagacgtgtccggggctggtcaaacacagggtccagccaagagttgtggaggtcttgtgggagtggtggccaccaccgcgccctctcagatggggaccacaggctgtggcactgtccccaccacatggaccctgatggggatgccatctcgaggaaccccaccactggggtgtgtgcgtgcgtgcatgtggggggagggagaggcattcgccagtaccagaggggcacagggtgggaaaagcgaggtgagttctctttttggtttctggttaatgtcaaagaacgtgaaggatcccacggataggcactggaatatgaatttttttttttttcagggaaacagacaggatggaaaaagacaactgaatgccctcaactgaatgtcttcatcccctcttgcctgaaatttccaccttcccataggctggggagggagtcagttccagagcagaggagggtgacagggttgaggagggacttgtgagagctagaacttggcaaaatggcctagcccacccttcaaaggggaaaagagggaggaacaggggatgaaaagttgtccgcaggccttcccttgaactctcccctgctggggggagggaggaggttaaagcaagaccccctgcccaggtggggagagctgggggccaggggagaaggggacacatggtagggacacattctgttgagcacaatgctaaaaattctgtacatcctttggatgaagctactgaatatttggtgtaaggttgttcaggccctttctctttcaccttctggaaaagaacatttggtgggtggtgctaagccccagcccatctgcccaggctgtgccctgtcttcgctggcccagggctgggggctgggattaggaagctggcatcttctctttttccttctgtagcccccacgggggaggcagggttgggggttggtcccacagccagggctcggtggcatgaggtctgacctgctggaggcttctccgcccctggctggggtttttatttggcgtcgtagcagtgagggtgagcacgctgaggtctggctcgcgactggttttttggtttgtttgattttgtgggttttttttttttttggtttgtttttggtttttttttgtttgtttttcacctctggttcctttggggcagctggtttctgttgtgattatttttggttttctcttttgttggttagtttctttcctttttttttttttttttggttggttgtttttttggtctttcctcccttgtcactcctgctctgaggaccctctgcgtccccaccactggcctcctcgccctcttcccaggcaagggaccaaggcagggaccagaggaatgggaggggaggcatggctggccctcactcaggtttggaccctgcctcgggcccccctggacctccaggggtctgtgctgccgtctcgctgcaagtggaggaggaggaggatgaggatgaagaggatgaggaggagaggccaggagacttgctggagatggaggctgccacagccgcagccgctgctgagaccaggcccacaccaggcggggtgctgagcaggggcagcccagcatgattcaagaagagcggcgaggtcaccaggccagggctccccggggctgcaccggctgcccccagcaccagattcccgctgccatcaaggctggtaaggggcagggttccaccagaggccagggctggcggggagagagagaggctgggctaagggcatgccgggccaggggagacctttgccttccagcatcctgcccagagtgccccccatctccccatcggtcccactgacccccatcagcacccctcacaccttccccaaaggtgagatgggtatgaagaggcaagcaatgcagtgagcaggggcaggatggcatggctggagcagcaatggcagggctcgaggccccagaggatagggctggtgacgatgggtgtgacatgaggcagcacgcaccttggatagtggccaaagggttgttgctcatgagggctggactcagcccggagctcaaccccaccattgtgcttctgcaagaggcaaagcagaggcattagcaggggcagggacctgccaacataactggggtgccgctccccaccctagaagcagcagcgaccctgcttctccccacagcttcccacgtgcacccacttaccccgtgctggggttcaggcctgacaagccgatagccgagtggctgccttgagggctggggtttgtgctgttggtggtggccgggggtgggggagtgacagaggggatggaattgagggggggcgcagccccgcccccgcccccaccccctccagctgtccggctggggtggagcgtccccacagctgaggataaggtagtaactgccagagagagacagaaagatggggtcttcagcttccactcgtcccccactgaggaacctggggtcagctcctacttgtcctcccgcccagctcacgcagcatctcctcagtcagaacagccttagacctccctgccctctcttcccagagtcatttccctgtgcctctgccatggtgacccctgtcataacaatggaagtcagagcaggtgcttcctgctgagccctggcactctacactccctgccctgaaccacttttttaccgactagaaacgggggtgcccaggagacaaagccctatggctccctctaggggctggggaggggcgaagggtgccaggcacactgccacatctgagggatgggcaacctggcaggggctgagggcccagactcagccagactgctggggtagaaactcctggctctgtctcatcccagtggtgcccttgggtgagtgccttaacctctctgaccttcagatcccttgtctggaaaatggggataataatagaccctatctcataaaatgagtttgagaattaagtcagtcaatgcagtttagaaagagtttagtacagtgccaggcaagcacttactactttataaatctccacttactattttctagcctggggaggggcaacgtgttgttttatgtgtatatatattatgtgtatatatattatgcatatatatattatgtgtgtgtgtatatatatatatatatatatattttttttttttttttttttgagatggaatctcactctgtcaccaggctagagtgcagtggtgtgatctcagttcactgcaacctcctcctcccggattcaagtgattctcctgcctcagcctcccgagtagctgggattacagacacacgccaccacgcccagctaatttttgtatttttagtagagacagggcttaccatgttggccaggctggtctcgaactcctgacctcaggtgatccacatgccttggcctcccaaagagcagggattataggcataagccaccacacccagcgaattttatattattattatatatatggtgtataaccatacatataaacctaccgtgtcccaggaagagggaggggaactctggatacaagactatgtatgtatgcatgtatgtgtgtatatgtacatacacatacactcttacatacatgtatttatatctttttatgttttacacattcataataatttaataaaaactgaggcttagaaggataaaataagtgcttgaattcacacagcttaaaaatgacagaggccaggcacaaaactcaagtgcctcaccttttaccaggcccatgcttttctcatatgaaatcgtgaagcagattaaagctgagttgctcctgcagaggaggggtgagtcctaccctcttcccactgtctctcccattcccccacccacactccccaggcccagtcttgaggcccatggacacccagagccacttgggaacctcaggctccagcctgtgccacatcctcccagtcccccctcaccattttctgccctccctgacctgttgtgctcagactgctggaagcttgggacaacggtaaggtccccgcgcccccttggggtgtgacctgaggagagaagaaaggaggtgtggttagccactgtctgccagcagcccccgtgatgctccctgtaggaccccactcctccgtcccaggatgggggcagggggctttggcacaatgctgcatttgtattattccacatgctttcttcacacttgccctagctgatcctgagccacaagcaggaagggctaattctccattgagaacactccccacctctcttctgacaccgccccatctggctagtctttgcagggttgtgtcctgtctgaagtgactgcaccggaagagtggctgctccacatgctcctgatattgttggttctgcaaaactaaaactcttttccctggacaagcaaacaccacccttttaccagtggggttggcaagcaatgcaggagagactgttcaaagtgacccaggcagggaaagagcagatctaaagtgcgaggctaaatggatgcatatctttgcatcggggtgttgagatgtcatattacttgattttctgggaccatcagcttccttcttggccaccccacctccagtctcacctttgcatcagccccagaaacctcactaaatgtgactctctccttccccagctcaaaaccactccttacctcctcactgcccatggttcaagttccagctcttcactgtaaaacttggggtacatgcccccactccttccccaacctcattcatataaactgcagcaccaaccacactaaattgcactggagtttctcaaattgggctgggcacaccctggcttctaggccttagtacacactggtccaggaaggctctttgccttcttgtggctggctaactctcccttgtcctttagaactcagttcagacagtgcctccttcacaccgatgggggcaggggctcctctctggagcatcacagctcttcccagaaatggaaataaaaggatgggataaaggatgtcccagctgtgtctgatatcaagtgggcctgtgtatagctgtggacctgagagtacacccatgggtgtgacaatttccccgaacggcaaataagtgcctctccctgcctctgtgtggttgtgagcctgtgtgttctaacctggaccacgtccctggacatatatcccttcctgtgtggctatggcactgtgataactctgtgtctggctatgtcggtgtgtatctaggggtgcttgtatcccccatgtaagaccacagttccctggaaaccgtccctgtgtaactgtgcccatctacgtgatggcctgtctccaagagtgactcttcttgtctctgttctaggctctgtggacaaccaggtagggtgggcttcacacaggtgcctgcggagctctgtggtctccccaccccccaggcgggctcttggtaccatatgggggctgtagctggccggcttccctgggctgggcagcatgggggccgcactgcaggggttgatgcgtttctccttctggcgccggttgcagaaccagacgcggatcacttccttctccatgtgcagctgctcggcgatcagcaggatctcctctgaggtaggcttctggttctgcaggcagagggctcgttagcccgaggcccaccgcccgccacccctcaggtgagggccacccaggagaggggggcctcaccgctagaaaactcttctctaaggcgaagcggacgtttgtctcgatgctggtcctcttcttgcgtctccggccgggcaggccgtcgaaacccaggctggggctgctcagctggttggggctgggcaggcttgagtccacagacatagtctctgtgcgccgggggagacgtgagcatgagaaggggcctcccgcggccagcggccactgcccgccccctacgcgggaaccccagcctggtcccacctgcatcgttgagccacttctccaggaggggcttgagtttgcacatgttcttgaagctcaggttgagggcctcgaagcgggaaatggtcgtctggctgaagtcgttgccgtagagcttgcccatggccaggcccacatcaccctgggccagtggggcggggaagggcccgaagtcagggtggggccttccggcactgggcccgctccgcccgcccactggccacgcccctcgcggcatctatcaactggccacgcccccacgcccaccgcccagcctgcaaggtgcctccagacctgcgtgaagcccagcttgatgcggcgttgcttgaaggtgcgggcgaattgctccagctcctccagatcactgggctcctcggggtgggatggtggctccaagcatttggggggctgcgggtgcgagaggtgcgggtcgggcagcgtagggcgggtcacggcctggtggggtgggcaggtgggtgggatgcagggcggaggaccaggatggggctcagcgatgggtgcacagtccccctcccgccctcttcgcccctgcgttccatccgccgcctgcagactccccccgccttcctccacaagcaccgtcaatccctttaaaggtccctccacatgcactgttaatccctttaaaggtccgactctgctgccctacatgggtttcctcattgcctgggactctctgcactgtcccttcacgcctgcgaactcccagaaggagcagccagctttttgtgccagggctctttccctggagctggaggcagtggttcatcctcatctcaacctgggaatcagggactggccctgccaccaaatcactgcttagcccaggcctcactttccccctctgcaggatgggaacaatcactgctgttctgtctacccagtggggctgttgagagaatcgggttaaaaatgagtaggtcgtgcagacccatggactgtacaatgccaagagtgaaccctaatgtcagctatgaactttgggtaatagtgatgtgtcaatgtaggttcatcacctgttacgcttgtaccactctggttggggatgtagatgatgcaggaagctgtgcatgtgtaggggcagagatagatgggatatctctatatcttccactcagttttgctgtgaatctaaaacagctcttaagaaattaagtcctaagcaatgagtagattgcaaataaagtaaaagttaagaaaaaaaaaaaaggactgggagggcaattagagagatttacaaaaaagcaacagctctatctgggattcttcattgccctaacaataaaggatatgaagcaggtggtgggtacagggatgtttgtcgctcaggtcctttatccattattctccaaaatgctggggcagatgtttaggaatttttcagttttttttttttttttttttttgagatggagtttcacccttgttgcctaggctggaatgcaatggtgcgatcttggctcaccataacctctgcctcctgggttcaagtgatactcctgcctcagcctcccgagtagctgggattataggcatacgccaccacacccggctaattttgtatttttagtagagatggggtttcttcatgttggtcaggctggtctcgaactcccgacctcaggtgatccacccgctttggcctcccaaagtgctgggattacaggggtgaccactgcgccctgcctttttttttttttttggtataaatttaaggacagccgagtgcaatggctcacacctgtaatcccaatactttaggaagccaaagtgggaggatcgcttgagcacaggaatttgagactagcctgggcaacatggcgaaaccctatctctacaaaaattttaaaaattaaccaagcatgtggggcgtgactgtagtaccagcaactcaggagggctggggactgcttcacttgagcccaggaggctgaggctgcagtaagctgtgatcacaccactgcactccagcctgggtgacagagtaagaccctgtctcaaacaaaaaacaaaatgttaaaagatacaagtgcaattttgttacacaaatgtattgtgtagtgatgaagcgtaggcttttagtgtatccatcacccaaacagtgtacattgtacccattaagtaatttctcatcatccacccactctcacccctctcaggttttgttgttgttgttgttttagagaccagtcttgctatgttgcccaggctggcctcaaactcctgggctcaagtgatcctcttgcctcaggctcacaagtagctgagactataggcatgcaccaccgtgcctgtttcagttttcagaaaacctacataggcagccaggcacagtggctcatgcctgtaatccgagcactttaggaggccgaggcaggtggatcacctgaagtcaggagttcgagaccagcctggccaacatggtgaaaccccatctctattaaaaatacaaaaattagctgggtgtggtggcgcatgcttgtaatcccagctacttgggaggctgaggtaggagaatcgcttgaacctgggaggcagagggtgcagtgaactgatattgagccaatgcactccagcctgggcaacagagcgagactccatctcaaaaaaaaaaaaaaaaacaaaaagaaagaaagcctacataggatgtatatcatagataatgtggcccggcccccacccccactagggtcaagaatattactccttaatcagatacagtaacagttttgcagcagcaaaaatgccataccaagagggacaaagaaaagtcatacactggcttatatcatggcagggcaggttttgcagtcaaatgagttctcatgccaatggtggaagaacaacttgactttctgagcatttgggatttcagaactgcagttaagacctgtattagtctctaactcttcagtcagtccttctgaaatagttcacatatatttttttaaagggctataaaaaatgggtagaaaaaaactttgaaattcataaaaggtagtgaaaattatcattaaagtctagaactcaggcagcaaactgaaagaaaggcctcggggtccaggtgccaaggtggcctggagagctggcaccctctctaaggggcctctgctcctgccagtggccaggccaactgctcactgcgccaagccaccacgtagacacaggtacagccctgccagattttctggtttatcaagaggagctggaaatgtggtgctttctgggaatttagttgacaatgaccaaataaaagacacctgtgggccttgttttcagtctccagtctgggaagtggatgtgaaataatcacctaacgaatgccttgttcagagaatcctccgttgcagtgctggaagaggcccgaggcatttgcagcctaaaggcttgcagccccttgcaattttgtgtgtttttacacatgagcattttgggggaatggggatcagatctaaatctttcatcatattctcaaaggagctcatgtactagaaagggttaagaaccacttgtctgggccagctcccctcattctatagaggaagaggctgacccagacagggagatgggcttgcctgaggtctcacagcaaatcactggcagagtgtggctgggtcaaatggaaaggagactctcactcatcccccacccccgtttacccagctttcagcaggccttgctgctggcctggcctggtgcactcaatggacagtctcacctgtgtgggaagcccggcccggggctgggaggtcagaagagctccctgggtttgctgaggtagctggaatagatttggtgtcggtagcaggcctggaaagacaaggggaaatacacagggtgagggggaggggaaggtgaggaagttctgtggaggcgtcagggaggccatctggggtgggggccttacctggctggctctgctgggcctgcggtagcaggaactgagcaggtggctggaggtggtggcctggcacaagcaccagctgctggagctggaggagctgctgtatgtcctggcagggagtggggtggacagaaagatagcctgagtcctggctgggtttcatcctctctgcatcacctgaaccttgaggggctgaaaccaggaagctgctccacatggcgatctggcactgggcagtgagggatcgtccactcggtctctgaatggcatccctgagctaagggcacccagaggcttctctctaccatggggtaccagagagtcccaactgggcagtcctgggagggctcactctttatttaccctttctttcttttttttttttttttttttttttttttttgagtctcgctctgtcgcccaggctggagtgcagtggtgtgatctcggctcactgaaatctccgcctcctgggttcacgccattctcctacctcagcctcccaagtagctgggactacaggtgcccgccaccactcccagctaattttttgtatttttagtagagacagtttcaccatgatagccaggatggtctcaatctcctgaccttgtgatctgtccgccttggcctcccaaagtgctgggattacaggcgtgagtcaccgaacccggctaccctttctttcttgatgaaatattttccttgttttaacatttccgcagaacaaatagaatcatttaaaaatgtaagccaggccgggtgtggtgactcatgcctgtaatcccagcaatttgggaggctgaggcaggcggacacacctgaggccaggcgtttaacaccagcctggccaacatggcaaaatctcgtctctactaaaaatacaaaattagccaggtgtggtggtacacgcctgtagtcccagctactccggaggctgatgcaggagaattgcttgaacctaggaggcataggttgcagtgagccgagatcacgccccttcactccaacctgggtgacagagcaagactctgtctcaaaaataaataaataaataataaaattgtaaaccagaccaggtctttcctcctttaaaaacactcctggctgggcacggtggctcacacctgtaatcccagcaatttgggaggccgagccaggcggatcacgaggtcaggagatcgagaccatcctggctaacacagtgaaaccctgtctctactaaaaatacaaacaattagccaggcatggtggcacacacttgtagtcccagctactcaggaggctgaggcaggagaatcgcttgaacccggaggcggagattgcaatgagctgagatcatgccactgtgtctctgcactgcagcctgggtgacagagcaagactctgtctcaaaaaacacaacaaaacaaacaaacaaaaaacactcccaaggcaaatgatttcatgtctggaattagctttaaaatactccagcaaatagtgtaaattagtacaaccactccgggaagctctttagcactgttataggttgcagtgtctccccccactccctgccaccccccaaaaaggtaagttggaatcctaacccccagaacctcagagattaaccctatttggagatagggtctttggcagatgatcaagttaaaatgaggtcattagggtgggctctaatcctatatgacttgtgtccttataaaaagggcaaatttggacatagacatggataacgggaagatgatgtgaagagacacagggaaaagacagccacgtgcaagccaaggagagaggcctggaacagatctctccatcacagccctcagaagggacagatccttccctcacaaccctgctgacagcttgatttctgacttccagcctcagaactgtgaggcaatatatttacctcaagtcacccagtttgtggttctttgttttggcagccctagcaaactaatataggcgctatctaagaaaactggctgggcttggtggctcatgcctgtaatcccagcactttgggaggctgaggcgggaggatcacgaggtcaggagtttgagaccagcctggccaacatagtggaaccccgtctctactaaaaacacaaaaaattagctgggcatggtggtgggtgcctgtaatcccagctgcttgggaggctgaggcaggagaatcgcttgaagccgggaggcggaggttgcagtgagttcagattgcgccactgcactccagctcgggcaacagtatgagactccatctcaaaaaaaaaaaaaaaagaaagctgaacatacaccacccttaggacccagcaactccactcctgcatgtaacccaccatacatgtgtatgtgtttaccacaagacatgtactacaatgttcacgtggaccatttgaaataggcaggacttgaagatagcccaagcgcgcacaacagtagaatgggtaaagaaactgtttcagtggaagctacagcaatgagaatgagcagtccacaagtcatggttacatgccacaacgtagacttcccaaacataatcagtgagagagctagtcatgacagagaacatcctgtacgattctaatggttgaagtttggggagtaaagactgaaaagggacaccagggggcttctgggagctggccacattatttctagatctgggtaccagttccatgggtgtgctcacagctgtatacctatgatttgtgcacctttatatatgcattatattttaataaaagtattttttaagacagggccaggcacagtggtatgtgcctgtaatcccagcaccttgggtggttgaggcaggaggactgcttgaggccaggagttcaagaccagcctgggcaacatagtgagacccccatctcaaaaaaaaaaaaatcttgtttgtatagtggtgagtaaaaaataaagtaaaataaagggaaaaaaggggggatgaggtagggaaagagggaggggaaaaaaaatccaatcctccacccaccaaaaaaagtgaggggtttagatgaaatcctatttgccaataggaagggcaaaatgttgatatctattgagcttggtgaagagtatgtggggttcatgacataattctctctacttttacgtttaaacatttctgaaagaaaaagcaaaaccgctttacacacacaatccaatggcttctcatagccctcaacaatgcaaacaaaacccctcacctgcctacaagtccctttatactgaggcctgtgttcatctccctgctcatctcccactgccctatccctccttggctgtgctccagccatttagcccttttctgtttttttttttcaaatgcaccaagcttgttcctgcctcagggcctttatacatgccgttccctctcctgggcagttctacttctgacactaatgcctggatcctaacacaaagtcaccctctcagagatgccctctttgaccacccagtctataccagcccctggcctggcctccccttatcaccccatttcatctccctcacaaggcttaacaccatctccaggcatcgctcctcctgtttactcattcatgacatgcccctctcactggaacgtcagctccatgagagcatgatcttgactgtttcagtcactgctgtatcctcagtgcctagaacagcacctggcacccagtaggtgttccacatagatatgttaatgaaccaagactgatgcttcatcatttacttggcaaattttatgtaaagttgaaagctataacatgttacttacaattttttccttctgggaaattgtgggggttggcacatgcccctcaattcttcccaatgctattattcctaaagaccaatttgatgtgccaggaagtgaacaaactgggaaaatatataagcaattcaacagaaggggctcgtttctttttttttttttttttttttttgagatggagtctcactctgttgcccaggctggagtgcagtggcaccatctcggctcactgcaagctccgcctcccaggttcacgccattctcctgcctcagcctcccaagtagctgggactacaggcgcccgccaccacgcctggctaatttttttgtatttttattagagacgaggtttcaccgtgttagccaggatggtctcgatctcctgacctcgtgatccgcctgcctcggcctcccaaagagctgggattacaggcatgagccaccctgcccaggccagaaggggctcatttctttaatatacaaagagagattttgcaaataactctatataattaaagaagaagaaaaaagtagtgattacaaatccataagtaaaaaactgacaacccagtagtaatgtggctgacagacaggtctggagagtgcccagtgaaattaatgtgaacagctctggatggaaatacactcagattcactcgcaataagataaacacgactgcaattgcactgagatatcatttttacctctcagatcaccaaatataaaaatagtgtgtaataccacattggggagtgtggggaaacacacattcttgtacatgctggtgagagggtgatttggcaatgtctatcaaaattacaactgcacacagccttcaactcagccattctactgctaaaaatttatctattctcactctagaaggctgggaatggccttctagagaggtgcaaaatgacctctctagaaggctattcccagcagcaagtggcattctggcaaaagagtagaaggtagctgagcatgcagcaagacaggatgggttggatgaatgagggcagagctctacagtggaatactatgcagtcaccagcaagaatgaggagtctctttgtgtcctgacatggaacaatctgcaggatgtcctgttgagtggaaagctcaagaggcagaacagagggtatgaggtggtactgtttgtgtcacacacaaaaaaagagtatatctggatatttgcttgggtatgcatagttgatgtctggaaaaccataccagaaggccacgctgtaaatccattcatacctctgggatttgaaacatgtacctggtctgagtaaataaatatcccagtgtctcacccccacccacccaaacagtcactgctgatcaacatccctgcttttcgacagctgaacactattccctgaccccctgggggtgcctctgcttattccgtgtatggcagtggactgggtactcctgtgctcctgacctctctaactcttgctgctaatcatctcagaatccagcttaagggttctgaagtcctagcactctatcctgtgaaacaatgtccaccctgccttccctttcccagctacccccagcccagtaacacctccatggtcacctccctccagatgtggatcaactgtgaagcgggcaacacttatgcttcagggccccccatttacagtgaaccctttcaaggccccatacctaatttttgtttcaaacattgtctttttctttcaaagggactccaagttgcataatcttttggccccacaaaacgagacccacctgccctgtgctacacgtctcccaagtcaatgcatttgcttatgtgtacttttcctctgccagactgactctagcagaccagaggcatatcttattcttcgtatatccctaactcatatcggaacctggtaagcccccattaaatgcccactgaattgaatctaatgaataagactagaaatcaagtcttattaccagcatttttctgatttcctataacccttagcttgttgattaaagtatttgttaactcctgttcctccctagcatgactctcaatgaaaattcccctttcctccagaagcctagagaggtgtctgtgggtttcgttctgaatcaccagcgagaggaaagaatggggaaagtgcatcccagtttgcagaaggtctcatggtgagaagttcagatgggaaacatttaatcacatccctgtctagtttctcagaccagagacttaggggtcagccttaatcccaccttcccttcctctccccatccatccaatccatctgcaatgcaagtcttcccagttccctctacatctcttcctgtccacagtgactgtcctggtccaaaccaccatccttctaccccagaccatccattcgcccccaggcaggcagagaggggtctaaaacaatagaggtctaaatgtttttgtgccctgaattcttcagcatctgaaaaaaaaaaaaacctattgccctcttctcagaattaaaaacacataacatatgatatataggatctttcttttttctttctttctttctttctttctttctttctttctttctttctttctttcttctttctttctttttctttcttttctttctttcccttctctctctctctttctttcttttttgagatgagatggagtctccctctgtcaccctggctggagtacagtggctcagtcttgcttggctcactgcaacctctgcctcccgggttcaagcaattatcctgcctcagacttccaagtagctgaggctacaggtgcacccaccatgcccatgcccagctaatttttgtatttttagtagagaaggggtttcaccatgttggctaggctggtctcaaactcccgacctcagatgatccacccacctcgtcctctcaaagtgctggggtcacaggtgtgagccaccatgtccagccagatatatagaatttcaaatgaaatcaatcacataattatagtcatcatcactagggactccaaagggagggagaagggcaaaggctgaaaaacttcctactgggtactgtgttcactactgggtgacaggaacaattataccccaaacctcagcatccatgcaatataacccttgtaacatacctacacatgtatccctgaatctaaaataaaaactggctgggcacagtggctcatgcctataatcccagcactttgggaggctagatgtgagaatcttttgagcccaggagtttgagaccagcctgggcaagatggcaagaccctgtctctacaaaaagaaaaaaacaagaaggaggaagaggagaaggaggaagaggaggaggaggaggaagaggaggaggaggagaaggaggaggaggaggagcaggaggagaaggagaaggagaaggaggagaaggaaaattagccaggcatggtggtgcatgcctgtggtcccagctactcaggatgctgaggtgggaggatcccttgaacccaggagtttgaggtggcagtaagctatgatcacaccatggcactgcagcctaggcaacaaagggagacacccgtctccaaaaaacaaaataaaataaaataaattaattaaaatttggctgggtgcggtggctcatgcctgtaatcccagcattttggaaggccaaggcgggcgaatcacttgagttcaggagtttgagaccagcctggccaacatggtggaaccccatctctaccaaaaaaatacagaaaaaaaattagccaggtgtggtggcgggcgcctgtagttgcagctacatgggaggctgaggaaggagaatcacttgaacccaggaggcagaggttgcagtgagctgagatcacaccactgcactccagctcgagcaacagagtgagactccgtctcaaaaaaaattaattaattaaaatttaaaaaaatataggcatcaaacatattttgagtggtcataaaatcatttatgggtttctttattagcacactaagtaacaagatccagcaatagatctgatgactactgtaatttcaaagcaatcatgagtgaaaacagtgttttgagagatctgcaacaactataagagaatttgaaaatctgcgtacattctcttggtgacaaagtctcagtaccgctaatactactgttgtctgttgtctatattcatgatagagggacatgctatggtttggtcagaagatagtaaaaattgagatgtaatttttttcccatccaagttcatggactctgaattctatgcacagactcttctaggggtggtctatggagtccaagtccctgttttaaaatataaattaagccataaggcctctactgattttcatcacatttgtggtataatccagatccaggctatggtcctgcatggcctgcccaccacccccgcttacctctccttccttgcctcacacaactctaactccctaactctgatccagccccactgatctccttcctgttactgaaccacaaagaagtccccacctcatacctttgctataccctttctagatctacacagaggtggtccctcctcatcatttaagtctccatcaaacgccccctccctagagaggccttctctggccacacactcttatgaagtcttctttttcctccaacactctctattacactcttttctttccttcatagcaattatctgcttcctgcctatctccccaactacagcgggtgtcagctccaagagggcacagacttatctacctcattccccgctatatcctcacccagaaaggcacttgggcatggtgatattcactaaatatttgccaactaaaggaatgaaagaaggggagaaagatgatggggcatggtggctcgcacctatagttccagcactttgggaggctgagacaggtggattgcttgagcccaggagttccagaccagcctgggcaacatgacggggtctctacaaaaaatccaggcatggtggcacgtgcctgtagtcccagctactcgggagactgaggtgggaggatggcctgaccctgggaggtcaaggctgcagtgagccatggtcacgccactgcactccagcttgggtgacacagagagaccctgtctcaaaataaaacaaagaaaaaaaaagaaagaaaggagagaagacaagattctgggtgaacaggaacagtaagttggctcaggactagggtaagccggtaggaggcgccatttctccacaatccagcggcagcatggccctctgaagccacttgagggcgtgttacgtccgagtcagagcacaccagtcagagggtggagaaggtatagtaagtggagacaggccagagaaaagaccctggctggcatattttgtagatcagctgctctgtccctaagctttaaggaaacctagcacaagagctagcatgcctgtgaaagctgagaagggacggtaccgattcttgctcattgctgtattttgatcaccctcccagtgcaggagcctcataggtgatcaatacattttcaatgaatgaatgaggtgaaacctcaggacagactggcagtactttgccatagctgggactttggctatgactgggggcagaaaggttgatatgtggattgcaggatacatgggtgaattgcccactttcctaccagggctcagttccacctgggggagaagagaaagccatgacagtgaacttgaggagttcactgaggaggagccccagagccggccggctgcaacggcccaggtgctgcacctcactccagtgcacaggccagacggcccatcccccatggcctctcgcgcccccattagaggcctccacacaatctctggcagccaccatgactggaatggtgttggcgcatgagttgacattcctttgccatccctgatatggcaaattgtgaccagctctggatcttccctctctaagacaagttaagtccagagtaggggagaacaggaaggagtggggtctgggaactatgtaaactatatcgtgatagattgtgttcaaaatgaggaagggaggatggatggggaaagggaaggcggacaacggacacagtttcagtgagataacaggaatacattctggtgttctattgcacggtgactactgctaataatgtactgcatatttcaaaatatcaaagacagagttttagttttagtttttgttttttaagagacagggtcttgctctgttacccaagctggagtgcagtgcgtgattatagctcactgcagccttgaactcctgggctcaggccatcctcccgcttcagactcccaagtagctgggattacactgcgccactgtgtctggcaagaagagtactttaaatgttttcaccacgaagaaatgataaatatttgaggtgataagtatgctaattagcctgatttgatcattccacaatgtatacctgtatcaaaacatcatattttactccataaatatatacaatgattatttgctacttaaaaataaaataaaactcagctggatgcagtgactcacgcttataatccctgcactttgggaggctgaggtgggaggatcacttgaggccagaagttcaagaccagttgggcaacatagtgaaaccccatctccacaatttttttttttttttttacttatccagatatgatggtacatgcctgtagtctcagctacttgggaggctgaggtgggaggattgcttcagccaggaggttgaggttgcagtgagttatgatggcgccactgcacctcactgcagtgagttatgatggtgatagagcaagacctcgtctctaaaaaaatgaataactacataaataaaataaaacttaaaattaaaatgaggtcaggctttctgacactctgagtaatctcagtctgtctggtggtgggacgcactgcctgggaagggagtgggtgcctgccatggaagccacctgggtgaaaatccccacctggcaacaacaccaacaaggaaacgcctaacctaggggaaggttagactagtggggtgcaagggtcccttccagcttggaaactcgggggtttgagccttagccctctcacctgcttcttgctgtgtgcctgggggaagccactttccctctgggccccagcctccttaactgtacaggatcacgatgcaagttgttatggagagacctgggccttggagcccagaatcctgactgcccctcacacacctcaggccgttccttaccctctttaagcctcagtttcctcaggtgacaccacaataagtcttacttcatggagctgttaaaggaattaaatgagacaatatgtgtagaatgtttagcctgattcctcttcacttaattggtccttcataaatggcagtcattatgactgagtcatttctctcccagggcctcagttttcttatctgtaaaatggggataataatgtctactttttcactgggttgttctgaggcctgagtaatattatctagaaagcattttggaaattacaacatatccctcaaaatgagcatttgctaccattgcccacctcatgtcaccacacttgaatgtgagctcttgagggtgggaacccaatctggctgagtccttccttccttccatctgtccatctatccttctttccttttctttctttctctctttctttggagacagggtcttactctatcttctgggctggagtgtcatggtgcaatcatagctcactgccatcttgacctcccatgctcaagcgatcctcctgcctcagcctctcaagtagcttgggggctatgggcatgcatcaccacacctggttaattttttttttttaagatacagggtctctctatgttgcccaggctagtctcgaactcgcctcaagccgtcctcctgctttggcctcctaaagtgttgggattataggcataagccactgtgcctggccaaattcattctcttcctgacaactaacaacttccagctcctgcccagatactctgctgagcttcagcctcaaatatgcatctgcttagttgatgttcccatgtggatgattaatagactcatcaaaccctaacatgtccaaaatgaaactgctggctctctaccccagccttccaaaacatcccattcctcccatcttccccaactcaggaaaccacgtcattaccacccagctgctgaagccaaaatcctaggagtcatccttgacctatccaatcaatacaaaatagcaaccaggatccccatcctcaccctcctggctcaagccaccctcatgtcccatctgtatgccttcaaggacttcctactgggctctcttttctactcttatcccctgcagtccattctcctatcccctgcagtcgattagtacagtcactccactagggcaagctctaaagatgggagtaggggcagaggagtggccgttctccagtgtgggttcttctctggacccccagtggttggccctgtgacatggaacccaggaagttgtggcgatcagggcagaataccacaaatggagaatgattcaacagggagaaaaaaatacctacatatggactgcatattacatcacatgctaccttatgctaaaattccaggacagacaggcaacagcagatcccaacccaggaaccagtgggagcaactggcatgcctgggccaggctcctggactccaaggccctgtggatgaactgaccacacacctccaggtgggcagttttgattggcctggtacccactgccccttcttcaacttattcaagcaacagaacccatctctttcaggggttacactttcccatcctcaagtcacgaggtccaggtagggctgaccttgccttctctggggtcgagggcaagggctcaaatctagccaggggacgtgtttttgtttgtttattttattgagacagagtctcactctgttgcccaggctggagtgcagtggcacgatcttggctcactgcagcctccacctcctgggttcaagcaattctcttgcctcagccacccgagtagctaggattacaggcgcatgccaccacggccggctaatttttgtacttttagtagagacggggttttaccatgttggccagactggtcttgaactcctgacctcaagcgatccgcccacctcggcctcccagagtgctggaattacaggcctgagccaccctgcccggcccaggggacgtattttatctccctgggcaggatagctacaagtctggaaatgctgacacccattttacctgccctacaatgaaacagggagacagacccctggagctgggcctgatattccagaccaggccttttcagtgatctgagccaaatattcctgagtcttcttcagccacctggacttgggctttggctcctccctcccagctcatccatccctatttgtgcggctacagcctgccctgttttctcactttgcacttgccattcccacagcctggaagccccttcccagcaaactccttcccattcccctgagttcagatcccacctcctcctgaaagcctggacagatgtgggtcctgattccctcagacacacatcacatttctcttcccacattcccatcacactcagttggtttctttgggaaactttcactcgctaggtcgtagcagcctaaaagattttgtcaagctttatttgccatggtcctattaggaaaataggaaattttcccccctactctccaatataaaatgatgttttaactgttaacgtaagttttcaatcaatgcctgcccctaccccagacattctgaaatacttccctggagagatatctctcctatccttgattgaaaatctgccgcaaaacatccctcattgattcggtaaatatccacacagccccctcggcagaaggcagcacactgagcaatggacagacaaattatagaactgtattataattgccccttcgtctgtacaagctaggagattgcagggaaggatcctgccaaactgtttaaccagcatttactttggaagctgacatcagagggctggaaggggggcttttccttggtactttatataatttcaaagggatagcatttatgagtgttttttactctctttcctgggcttcttagtatctttcaagtgaaacatttcttagtggctcactgatgtgcttgctccactgcaggacggggagcccctcaggggcaaggatggctgtgactcactcctaagtcttcagcttcctgccatggcctgacacacaggaggccaggaaatgtttgtggaatgactgcaggatcagagcttagcaggcatgagaagtggactggggggtggaggtcatgagatgcggcccgggagagacatccgagcctaggagccggggaaggctggagcagtgggtaggtaagtcaggaagagctggtccctctgcagcctgggcccagcacagtgcccataggaggtgctgttgtagaaatgacgtcaaagggcaactcagtttgtgagagagaattcccagaaaacaaacttggcccagctttgcacttgttgaagacagaaagggaaagatcagagctgagggaagctggggaaggaggagtgagaggaaaggaggaggggtttaaggagcccttgacaatcagggcctgggctatacggcaggtggtggaggctcagcttgctgctgctgggtccctggggagctgggggaggtggctctaggagtgcataggcaagaatgtctgctgctcacagagatggtggcctggctgggtctgcgctaggctgccctgttctgccttctatcctctagtctttgttccttcaactgatatttcctcgagcagattcaggcacggctggggggagggaagtcatcatgacttcctagaggtgtggactcctgggctggggctcagatgaagaggaactgtccaggtaaaggaagggagcagacttcccgggaaaagagagaacaagagcagggccactgagatgcaaaagagctcagccccagtgaagagccccaagcccttggcgttgctcagtaaagggctgtctatgctacaaggcaaatggaacacctgctgctggagtctctggtggccggggtgggaggggctagaaaccatgttccgtgaaggacagctaaaagcagcagccgcggatcatgtggttagagccctggacttccaggccggctctaacactcatgcttacagaataatctggggcaggtcactttaccccttggagcctcagctgtggggaggattcatgggagcaaagaggccatcactggcatggtgcctggaagaaaggtggcacccaacagactagttactgttacttcaagagccaggtattgaaaggctacatctgggctgagcaccgtggctcatgcctataatcccgcactttgagaagccaaggtgggcagatcgcttgagctcaggagttcaagaccagcctgggcaacatggcaaaaacctgtctctacaaaaaatatgtatatataaaaaaattagctgggtgtggtggcatgcacttgtagtcccaactactcaggaggctgaggtgggaggattacttgagcccaaagaggtcgaggctgcagtgagccataatccgccactgcactccagcctgggcagcaaagcaagacctcatctcaaaaaaaaaaggctacatctacaagagccatcacggagccatgcgcccagtttacagagtgtctccacagaaccaggcccagtggaaggaagttctaaggaggcaggttatcagctcagtgttaaggaaagtcccaaatgggagcattggccaataatggaacgggccattattggggtgaactgtaacaagggaacagccttaccagggctggacagctccctgcatggacagcatctatatctagggttctgtggaagtggttggacggagtgagagaaaagccttttgtggagcagtcactgagggaaacgccaggctaagggaagttaaacaggtggctttgctgtagggcttcccacgaccttcactgccctgaaacttggccacagctctaaggcttatgaaaaccagacagacaacatgaatgggtgaaaaccagacagacaacatgaatgggtgacatgggaaggggtggacaggagtgggctggagacagctgcccttcggaagaggaagcctactcagctcccactctgctcccccggctgtccttatgggaactctgttggccactgttaggggttaaattgtgtccccaaaaagatatgtggaagccctcactcctggtacctgtaaatgtgaccttatttggaaatagggttgcagatgtaatcaagttaaaatgaggtcaatggggtgggccctaaactaatgactagtgtccctacaagaaagaaaaatttgaatacagagacaggtgcacagagagaagatggccatgtgacgacagaggaggcagagattggagtgagccatctactaagctatggaacaccaaggattgacagcaccatcggaagccagaagaggcaatgacagattctccctgggaggcttcagagagagcacggccctgccgataccttgagtttggacttgtggttggagacaatatgtttctgttgccttaagccacccagtttatggtattatgttacggcagccctaggaaactgagacagccactaattcatgattaactatggaccagcaaaagctccagagtcagggaggtgatggagaacctcctaattcatagatcacgggccccttttttgaaagagcatcttgttggataagccaggggacacgatgagggtagggcactcattcttattcttaaccttttgttttgtacccacatggtaccattcacgagagtgactcctggtttccttacctgtatgttgaggacaacaatctcaacctcccaggaggctgtgaactcccagcgagatgcacaggaagcactgcccccaacacaccaccagagggaggattatgatgtgggatattcctccctgtgagcctcactttacccctctgtaagatgggacagcaacatcttccaaagcttcctagggttgctaggaactgcctggcatgtggctggtggtcagaacagtccatgtggaccagtcagccccttcccacacactcactgtttctgcatgtccttcactgcagggagcctggtccccagtggctgcccttacctgtgctgtgagctggatgggttgggacaaggtgagctgtggggtcccagggggctggctggcaggctgtggtggtggcaggtcaccccccccagaggaggctgggggctgtgaggtcgaggaggaggcagaggaggaggaggaggaggaagtagaggaggaggcggaggcggcggcggcggcggcagcggcgttagcggcagcggcggcactggactgctgcacggcggcggccaggagctgggcctgggcttgctgcaggaggagctgctgctgagctggcatcagtgccgtgagctgcggggtgtcggggacagcaggaattggagcaaggggttgaagaggagcagagaaggcagagaggggttagtgcctaagccaagcaagtaaggggacaagacctcctagaggacagaagagggcaagaggcaggtgtgagagagtggccatggccttggtggaacagttcatccactagccctgtaacagatgaggggtggctggtttgtcccctcgtccccatccttccccaagtacttaccccagctagctggctgcccgtcaacatgagttgggcctggggcagatgaggctgggccggctgagggggcaggggtgctgctggggctgaatcgccactggggtcttcagccttgatctgggggggagagaggcagggtccgggaccccagaatgttaagtggaggccagagagaatgcccacctgtgaaccaaagagagggcacgtgtgtggcaatggcaatcaggctggcacaggaggagcagactggggtgtggacatgagggtgcagtctgtggtcctgcactgaccgctgggagcttcaaaccactcctctggcctcagtttcctcatcaatcagatagggctaacacaacacctgcacccaaactccctacagaagtcgcctttgcagagcacttttcccctcctgagagtcagttttcctgtctgtaaaatggaaaagagtggctgggcacggtggctcatacctgtaaccctagcactttgggaggtcgaggcaggcggatcacttggggtcaggagtttgaaaccagcctggccaacatggtgaaaccccatttctgaaaaaaaaaaaggaaaatactcccactgggcacctgggaggtcaaataagtggcttctgggtcccacacccttcatctgtatcacacagaggtacatctctcttgctttttttttctttttgtttttgagacaaggtctcactctgttgcccaagctgaagtgcagtggcatgatcacagcttactgcagcttctacctcccaggctcaagcaatcctcccacctcagctttccaagcagctgagactacaggtgcccaccacacacctggctaatttttaaatttttctgtagagacagggtatcactatgttgcccaggctggtcttgaactcctaggctcaagcgatcctcctgccttggcctcccaaaatgctggaattagaggcataagccactgcacctagccaggtacatcccttatttgtccaatgaagtaagactttgttggaagaaaaggttttcaggtactaagaaaaaccaccaccttggaacctgggctacaaagtcagatgcttacagaaatgggcacaaatgaatgacaggagtaggggtggatggaggtgggctggagagagcgcctgcctaagtggaaatcttatctggctcctactcagctcctgctggccactcttttcaaaatctagaacaaaaatactggcataataagcaaagcacagcatttgtcctgcactgtggacaagccagatgtggcccaggaaataccaggcttcagcctccgctcctgaggtctgccaagcctctccatgtctttctgaatatgatatggacacaccttgcaccatacacacagaacagaccagcatagagccaccctggcctcctccattcctaggtaaaaagccagacaacagcagttgttggctgaaaggcctgttggctgaagcacacacagtggtgggagaaggcatggcctgatggatcacacaccctcaggcctaaagtggacagtgagtttatccttcagcctgatagcccaacaccattttgtaaaaggaagtccagagacagaaagcaacttgggcaaaatgacacagtgtgttggcaggggggtgatatttggaatgtggacagagacaaacagaggccaaggaaaggccaaataatagacagtgaatggcatgtcccaaattatggaatataagtattagaaagtttaagagctacagaggccaagtgtggtggttcatgcctgtaatcgcagcattttgggaggctgaggcaggaggattgcttgaggccaggagtttgagactagcctgggcaacagagcaagacaccgtctcttaaaaaaaaaagagagagagagaggttaaaaaaaaaaaagtgctgcagagatgcagcatgaaatgacactgagtatgagaagtcagggtagcagctatccctggcaggggcattaagggcctctggaaggctggtcgtgctctgcttcttgatctggtgctagtgacatgggtgtgctaagtttctgaaagttcacagagtcatacattgaagatctatgtgtgtttttaatgtgtatcatattttaatacaaagtttttttaaaaataggctgagcgcggtggctcgccccttaatcccagcactttgggagccaaggtgggaggatcacttgaggtctggagttcgagaccagcctggccaacatggtgaaaccccatctctactaaaaatacaaaaattagccaggcatggtggcacacacctgtaatcccagctaattgggaggctaaggcaagagaatcacctgaagccgggaggtggaggtgcagtgagccaagatggtgccatcgcactccagcctgggcgacagagcgagactccgcctcaaaaatcgcttgaacccaggaggtggaggttgcaatgagccgagatcatgccattgcactccagcccgggtgacagtgcgagactccgtctcaaaaaaaaaaagttttaaaaaaataatgttgaatgccatggtgagcacactattcccttttcagtgcttttttcattgtttctggttatcttaaagtctctgattggtgcttgaatgtctttaccatctctccaatactagctaatctccacttttattttaattttttttttgagacagggtcttgctctgtcacccaagctggagtgcagtggcaccatcaggactcactgcagcctcaacttcccagactcaagcgatcctcctgcctctgtctcaagtagctgagactacaggcatgcacacccagctaatttttgtattttctgtagagacagggtctcactatgttgcccaggctggtcttgaactcccgggctcaagcgatctacccaccttggcctcccaaagtgttagaactacaggcttgagccactgcatctggcctaatctccttttttttttttttttgagctggagtctttctctgttgcccaggctggagtgcagtggtgcaatctcggctcactgcaacctctacctcctgggcacaagcaattctccacaatgcctcagcctcccaagtagctgggattacaggcactcaccaccatgcccggctaatttttgtatttttagtagagtcgaagtttcaccgtgttggccaggctggtctcaagctcctgacctcaggtgatctgcccgctttgtctcccaaactgttgggaatacaggcatgagccaccgcgcccagccctaatctccttttttaataagcctctttttaataagcctcttttttaacaggcctctgaggtttagacccttcggcacacaagagactctgggtaaattttaataatcatcatatttatttccatggcaagtgattctggttttccatttgtgaaatttccatttaaaaaacatttatttaaaaagctgtcgaaaagcaagccagttcatgagttggtaattgttgaagctgattgatgggtatctaggggctttattttcattataaccttctctctatttctgtatccacttcacattttccataataaggtgcttttttaaaaaattgagccaattaacaaaattattatgtaaatagttgcgcacagtggtcttatgcctgagactgtgacagaagcacatgaatcacttcagttagggaaagactgacacagaagagatggagagaagttgagaggcaaagcccagagaaacagggcgtacagggcgagttgtggacagagcccgaggccaggaaggggagggagaaaccttcattcccttggtcccactggcatccccaaaagaaggaagcctgctgccagtttgagaacagactgcaaagatctgattcaactgaggacagggtgggggcaatggatacacgctgtgctctgagggctaaggcaatagccaaacctgccatcagagggtcaaggaggtcaagatcgagagcctgtctcccctagaccccgttcaaagcgctcagcacagaagcaggacatctgctcacaaagcacttttatcctctcctctcatggtagcatgggggtacaccagacatggaggcaaccacagaggccatcccatccgactgccccctcccccctgaccaatgatactgaagaggaaactgagaggcccagagaggggaagtgactttcccatggtcacagagcaaagctgtagcagggtggggagcagttcccagcctcccaccccatccctcagccaccactggtcagggtctggagtcctgctcacaccttctctgcccccacctccagtgctaccttcaagcctctggacctgcctgctacccctggaccaggctggagggtggagactggagcccaggcaaccccaagaagcccagaatgccaggcacagggccccatctggatgtggaatttgcactgcctggctgcttccggcctccctgtcattctctcctgcattcctacagctatcctcaactggtaccagcccccccacccccacctcagctggccgctaaatgtgtatattgggggacaggcggtggtgcaggcctctgttgggtcagggaagttgggatgggggcgggcctttggcttcctgttgttcatcgccctggggctctgggggggatttccctagccacccccaccccctagggaaggggaaggagcctgcgtgagtcacaggcctggggtgggagcccaagagtgagaaggggcgggaggaacctcgttaccaaggtaccaaggctcagtgctctctcagcccttggactgaggcaggcctcctgaggaccctcttccaagcgctgcccacttccctggctgttctgacaggtgcttacctttgtactggggccagttggggacacggagaatggggaggtcttattttgggggttctgcaaagagaaagtaggagcaaggggatgggaatagtgcagtgaagcagcttctgaccacccccgctccctgccctcctaccataggcggcacagagccccctctgaacccctctccccattccttcccaccccctcccgcttatccactccctcctaacctgatgattagtgtctggtccatttctttcggtgtctgcaaagagagggaaaggatgtgttgtcatcagccacccccaccacacctgtcccctcccagctctcttcccatctgtcccacttcccctgcccacggtgacccctgcccccctgctccctgcccacccacctgtgtgctctgatggggagtccagaccttgcttctcggcctccaggggcttagacattcttatttctggggacagaggaggaatggaagtggggtgaaggaggggaatccaggagggctctcgggcccccattccaccacactccccaagcctttcccccaaattccccccttacccccagccaccttggaagtgtctcttcccaagagacatgtcctccgttctgggcctctgccctcctctggcaagatgagacacagcacttaggccttgggggatcttgccttatcctttcacctctccagaaagtaacacaggggtgttacccacagtgcagcaaagggcagggcaggagatggaaggtggtcgtgagaaggtatcagctgcccaggaggaggctggtgacgtcccaaaggagggagagcagccttgggcctcctcctggggcgggccgcccaggctcccgtcctgccctaccaggtttcgggtgagacatgttttccactctgagtggggcctcagagatgtgatggggctgcagcgtccccaaaggaggcagttgtcagatctcagcatgtgtgattcagccgccctctggccctcttcccaccccaccactttccccatccacatcttactcccacctggactttcttcctatgtttagcacaccggcctagcagacccaacctcatcctctgtaacctcagctccatctggctctacccctgagcttgtcctccaatctaaacctgatctgggacttcacgcttgagccccagctgcagtctcaagtccacccctgtaatacaaccccattctatagctccctaggcccaggaaatgaaaggaggtggccaagggagggtggcaggcagcaagcacataaacccacggagacaaatgcctgtcctcaaagcgctctgatacttttcacagaaaggcgagtgctcaccagtgccaagcatagagctagatatgactcacagctcacattagcggttagtgctaatattaccccgttttacagaggaggaaactgaggctccacgaagggatgtcacctccccaaaagcacagcaagacagcagatgtgccctgattggacccctggtcttcatgactgctgggctcctacttctaatcggatccactctagtctaatgtcccctagtcctgacttccagccatctcatctccaacagttccctcgcccaagctcatcctgaaactgaatccaacccttcctggtcctagaccccaggacaaatctgggcttcagcctgacccatccttagtccacttactcaccttgaatcccaagttgtgcccagatggctcaagtccttcatctgaccttgactcccaactgtcctgagatcctgtccctgatccaaactcttcccacaactcactccaaaatccctgcctaaaccatgaccccactcctactaaaggagctgtccaactctagtgttctctgcaccaagatacttaaagaagacagctaagccaggcacagtggttcacgcctgcaatcccagcactttgggagactgaggcagccagatctcttgaacccaggagttcaagaccagcctaggcaacatggagaaaccccatctctactaaagacacaaaaattagctgggcatgatggcacgcacctgtagtcccagctattggggaggctgaggcaggagaatcgcttgaatccaggaggtcaaggctacagtgagctgtgactgcaccactgcgctccagcctgggtgacagagtgagaccctgtctcaaaaaaaaaaaaaaagaaaaaaaaaaagaatggagctaaagtaagggataagaaataggaagaactcagtaactgtaaaaaaaaaaaaaagtctagaaatcttgcaattgagtattattcaatgtgaaatgctgcttgagttttaaattcctaattaaaaaaacaggtcatgcattgctggtgggagtgtaaattgatacaagcaccactcagaaaagctgaaaagatgccctctccctaagatgcagcacgtccactcctgggcatctgcccaaaagaaacacgtgtcctgcccatcaaaggacatgggcagaattcttctgcagtctttcataatggccccaaactggaaacagcctaaggggccgtcaacaggtgaatggataaataaaatgtggtatgtccatacaatgaaatatgccacagtaatgaaaaagaacaaactcctgcttcatacacatggccgaagcttggagacatgaggctgaatgaaagatgccaaacacaaaggcagacataatttatgattccaattacaggaaattcaaaaacgggcaagctgatagcagatgatcacagtcagatgagtgagcaccttgggggtactgactgggaaagggcatgaggaagcctgcaccaggtaagaaaggatcttgtttggtggttacagggtccttacataagcaaaaattcatcaagctatacacttaaaatttgagcactttactctatatacgttatgttttaacaagcaagaaaacatttaaaagctaaaaagcaaaacgccagcacacagtcccattaagatgcacactgcaccaaggcaggtagatcacttgaggctaggagtttgagaccagcctgggcaacatagtgaaatccccgtctctccaaaaaataaaaaagttaaccggacatgatggtggtgggcacctacagtcccagctactcagtaggctgagatgggaaggtcgctcgagcccaggagattgaggctacagtgagccgtgattgtaccactgcactccagcttggataatagagcaagactctgtctcaaaaaaaaaaaaaaagatgtagactgttgagggtgggggtggggagtgggtgcccaggacgctaccagagttcaggtcctgtttcctggccctggggacagggcattaaatggctactgatacaagatataagaaggacaagaagggagctgggcagcaagtgtgtcctgactttggagcagtaaaggcgggaatcctgcctgatcctagctctagttcacccagaccttagccctacttcaggcagccactaactctaacccggtcctaaatcccacccctcctagcatccctaaaactgcagccccagcctcctctggcctccgtccctccagcggagctccacattgcctcagggcaatcctttcctggctcctccctatctcctggagaaataaacaacctggcctccaggggctggcccaccaccctgtactgctcttctcttgcagctcatgcacagtgctcttcacccatgtcgagcatctccccctgcttgggggtctgcttgacagcaggctgtgcaggttctacactcccacctagctgggcatccctctcccgtccacagaacagggcagcctcggaccccactgccagcccagaaagtccacactcatccttaacctctgctatgggctaagttgcatctaccaaaattcatacacggaagtcctaattcctgatacctcaaaatgtaattgtatttggagatagggtctttaaagacgtaattaaggtaaaataaggtcattagggtggaccttactacaatctgactggcatccttataagaagagggggcgggcgcggtggctcatgcctgtaatcccagcactttgggaggccgaggtgggcagatcaccagttcaggagtttgaggccagcctaaccaacaatgtgaaatcctacccctactaaaaatacaaaaattagccgggcatggtagtgtgtgcctgtaatcccagctactcaggaggctgaggtaggagaatcacctgaacccaggaggcagaggttgcaggcagccgagatcgtgccactgcactacagcctgagtgacagagcaagactccatctcaaaaaaaaaaaaaaagaagaaaaagagggaattaggtcacagatgggaacagagggaagaccatatgaagacccaggagaagaccagtggaccacaagccaaggagagaggccttggaagagaccaaccctgctgacatcctcgtctttaacttacagcctccgtaattgtgaaaatgaatttctcttatttcagccacctagtctgtggtactttgatgtggaagccctagcaaactaagcctctcacagcccctgccctcctgctgtcccatccctgagcccccagttgtggctgtctgtgtccaggttccttccccacaagaccaatgcgacaggcctggtctgactcatcactgggtccccagcatcacaagcccagaacgggttgtaactgctgaatgtccctctctttagcagtctctgtttcctactacttctcacccttgtcttactgtctccctgctatttattttatttaatttatattttgagacaagagtcttgctctgtcggccaggctggaatgcagtggcacaatcacggctcactgcagcctcgacctcctggggtcaagctatcctcccatcccagcctcctgagtagctgggactacaggtgtgcaccaccacatccagggactacagctgtgcaccaccacatccagctaattaaaaaaaaaattttttttttttgtagagacgggtctccttatgttgtccaggctggtctcagactcgtgggctcaaatgatcctcatgccttggcctcccaaagttctgggattacagccatgagccaccatgcctgcactttgccatttaaaacatttcctgaggccttggcatgggctgttccctctgtctggaacactgttccccaatctgtccacctggcgacccccggactcatccttcagaacccagcataagctctgttttcttttctttttttttgagatggagtcttgctgtgttgtccaggctggagtgcagtggtgggatctcggctcactgcaagctccagaggtctcctgggttgaagcaattccctgcctcaggctcccaaatagctgggattacatgtgcgcgccactacgactggctaatttttgtatatttagtagagaaggggtttcactgtgttagccaggatggtctcaatctcctgacctcatgatctgcccacctcagcctcccaaaatgctgggattacaggcgtgagccaccacgcccggccataagctctgttttctatgaaaccaccaccttgatgcccccagctcccagccaggtctctctccagctccccataccctagcaccttcccttgtcactgtcttagaggctgactgtagctagccgggccccactatgtctcccctatcagactaggaatttttcaagggcagatctgatctcaggttcctaaacactccccagcagaagacatgtggatcagtggccccaaggtcctgatctccctcccccaggcctttgcctctgctcgtctcccacttgggtgaccctttccttctctactggcaaactcttgctcctctttaaggtccagctcaaatgtcacctcctctgtgaagtactctctgattccccagatggtcagtgtctctctcttctgggcttcactgaccctgtactgtgctccaccacatcctgatcatcctgggcagagacctccaccccaactgtgggctcctcaggagcccaggctggagtcattgctgcacaggcctaggagtacgtctttggaatgaatgaatgcattaaagaatcccctaactgaccagggcccaatcctgtctaaaacaaacccctatctctactgtcacccaacatccccaagaaaccctaacttaaatctttaaggtatgatttcctctgcagagactgtggctggaaagacaagagtggtttgagggaaatttttcaccattctgttacccttattctccctaaattatcccaaccactcctacatatccctgcatactccctgccccacacttggctgggtcacaacaaaatggccaactgctgccctttgtcttttctctttccacctcccctgtcagagctcaatctgagagaagggtcagatcatttccaccaggaatgaacagggagctccatttccaccgtggactaaaagccaaatgacgccttaacagggactccagggcactagcaatcatagacttggagggtccatcaaatggctcggcctcagcctcagcctgagcccaggcagagatgcccatcgcctatcactcaactctagaaaaatattgatgcctgttcccaccctagactctgatttcagtggtacagggtgtgacttgggcatccagatatttaaaagcccctccaggtgattctctttttttttttttagacagagtctcactctgtcgcccaggctggagtgcaatggtatgatctcagctcactgcaacctttgcctcctgggttcaagcgattctcctgcctcagcctcccgagtagctgcaattacaggcatgcatcaccatgcccggctaatttttgtatttttattagagacggggtttcaccatgttgggcaggctggtctcgaactcctgacctcaagtgatccgcccacctcagcattccaaagtgctgggattacaggcatgagccaccgcacccagccccctcctggtgattctaatgtgctccatcccctggcaccttcagaagcccctctcaaagcctcattcacacacaaaagattggttggttatgtatggctattcccacccctcatcataggtaatgtgtaatattttaggggaactgaaagagaaaaagcaatgcatagccctaccaggccccttggagccatgttgccccttgaatcccaccttcctcaggtcagacacccctcaaccagggctgcccagccctgagctcacactcacttgcccgactgccccaggcctgggactcttggtcctctccaccctcccactcctccctccccggactttcacttctcctctgcatttccccccgccagttttagcagacttaggccagcttctcgttagcacttaccgaaaacggggctaaatatagagggcccaaggactgcccctcacccctcctggccccacttgtcctgtcccctgggtcccctgcctccgcagcctgcttcaattaggggtatggcctgggagcccctgtgggcaggttggtgctgccgggaacctctgtgggcccagctggccgagcccccgtcctccccagaagcagcacctcacccctccccaccccacagctgtccctgggtggcctcaagggagtgaacatttctgagttgtcaggagggagggatggagatacaggcagcagacacaacaagagaggtggccccacagctgcgctgacagcaggcaagagctgccaacagtacacaccccatggccacagccaggcaaggccccggccaacacaatacaagaaacagatgtgcacagattccagacaggaatgtgaacaggtttgcagatacgacacatgcccagacatgatgccacgggcatatatgcaaaacacacacccaaacgtgcgtacacacatgcactcacacacactctcacactgagtgacacacagccagccagacacacgtaaaaagtatacaaactcacacacccggagtcgaacacagacatacaccctccccctacatactacacccagtcactcacagactcagacatgtgtacgcacacatgtacttacacatgttctcacaccaagtcacatcagtccagccagagatacacacccagacatgcacatgctcacacagagtcacacacacaaacacaagtgcacacacatacacccagagtcaccttatcctggaagatggccagggctgacctctgaacccagttcacaggtgtggagtctgagaccaggcagggtgagtgatctgcccacagccacacagtgtattaattcatgtccaggcagggaaaattcaccccagtcttcccacactgggctgttctgtgagaaatcccaagtaaagggtttagcctactgcccagcacctctgaggtccccatttaaccccagagaggaacgagtcagtgggagcagacaccctggatctctgtgtctacactgtatggacacacacacatatacacagttgcatacacagtcacctcaacaaataaacatgtcaccctgcaaatagtcttcctttcatcccacccctctcctcaccgcctttgcttgctcatacccactcattcttcatatccctgctcagacacccccttcctccaggaagccctccttgacactctaccaactaaatcacatgttttcagggctcctacgatcccctaatacctccccgtcctggcccaacccctctacctatgtccccctatcccagccctgacccctctgcctgggcctcccccatcccagccccaacccctctacctatgtccccccatcccagccctgacccctctgcctgagcctccccaaccccagccctgacccctctgcttggggcctccctcatcccagccccaacccctctacctttgtccccccatcccaccccgacacctctgcctgtgcccaccaccccagccctgacccttctgcctgggcctcccccatcccagccctgacccctctgcctgggcctcccccatcccagccctgatccctctgcctggacctcccccatcccagccctgacctgtctgtactgtcattggtgacaggtctgtcttctccaataaactgggagctccaggaggacagacctgagctaccctttccactgtacttccaacacccaacacagaactactcaatagatacatgttggtggaggacacacgggtgcccgcacacaatggcgcatataggacagcacacaccaccaaaccaagactcatgcccatggtcatgcctacacagccacaaatgaaacaggcatgaagggctgagtgcttgccatgttccaggcactgtgctaagcatgctacatgtattacctcatttaagactcccatcaacactgctgagtgatagccatcaccatacagacatatacacattctactaaatgagccaacagctataaatcaccttgtacagtgcctggtgcacaatgttcactcagccaactgacatttggtggagaaggcatttaataagcacacaaacaaacacataatgaaattcccagcagtgatacgtgccgtgaagaaaagataaagcagggtgaggggactgagagtgacaggatcagtgccagtttagatggggaggtcagggaaggctgccctgaggaggtgacatctgaggtgaatgaagtgaagaagggagccaggcaatcatcaccccacaatgccacacacaacagccccctacactcacaagcacacagcagtcccactcagagcactcagaactactgcacacacacatgcacacgcacacctgtaccagatgtgcacacacacactcaaaagggaatgacatcccccaagtccagcaacttggcattccaatccctttgcagcccttatccaaggattgcccatgtcacccaccccactggttctccacatgagggcccgctaccaacacccagctccctccctcccgtccccagacccttcggaacagggcaacagagaagagaagatgttggaagttccggtgcctgatgtggaaagagagggcaaagaggagctgtgggggttagcggggacccggcatgggagagagggagttgctagagtacagaggagaaggacaatggagacagctgaggaggaggggcaggcagggcccgcagagcaaacctaaatgtgctgcctgtcctctgagcagtggcacaggcaccagcccccttacctggagcccccatgctggagtgaaccatgctgcccgccccgccagggctgggggaacaactgtgtcatctccccaccctctctgggggccgagccctccctgccggaagtcactcagggaggaaaccacagggccggtccgcccccttcagaagggaaaataccctggcccacagacccgccccggcagcccggcccaccccaaatcatgtgtgtgtgctggggggtgggggctagtggggcagaggataagcaggctggaagagccgactcctacggctgcgatccaagaggtgcctgcaacagttgccccccgacttctgtcgcccccatggaggcaaacaagtctggaacagggaatgggggtctgggagagaaggtgggtccacagcagtaacaacaataaaacactagccagcagcttattggagagagggctttgccgatgcctgaccctgtgcctcactcttgacaggtgccatctccaatgtggtggtcactcttatttgccccattttacagatgaaaagactgaggatcagagaggtgagcagtagctttcccaaaggcccagagccaagaagcgttgaagcttaaaagcacgccgcggcagggaagatcaagcaagccctgcgcctatctgcaggtgagctgttgggtgccaccattgggaggaagtggtgcccgtgggcagtggtagtggggacggtgggtcggggacttggcctggggctacaataagtcgccggccaaatgcgggcgcccgaggcggctccagtggaggggagcaccaggtccccgggctgccggctggctcttcgcgctgcggcgctcccatttcagcgcttccctccgtgcccgccagagggcggcagcgcccagccaatgggccggagggcggggccggctgcggagaagggagcccctccctccgctcccctccccaacaccctcccaacacctccgctcgcacacctgcgagggtcacacaaaggcgcaggactcccggcgcaccgcagctcagacaaaggcgcgcccgagtccgctgccctcttcctcttggtgcccgaggtctgaggctgtggggctgcctggcgtctccagacaccccacatgcccgcctgggccccgcaggacatcctgcgccccgtggctggggggccccctaaaccacaggtgcatgcacagacgcctggactcaccctcacacacacaagtatttctacagatgaaccccagcacttcacacacacacacgtgtgcacacacacgtgcatgaacacatctatgtgcacaggccccaacaccagccctccctgctgacgatggtcactcccatatactgatacctcctctactccctcacatggacccatgggcacaagggcacttctacacatatgtgcccaagcatacttcctggccactcgcacccactcacacacaggcacactcagaaagggtatactacaggcacaactacaggagtgccctcccctgactgcacacgtgccctgtgcacccagacacacccaggcaagcaggtgggcacaacaggaaggactggcagttctcatatatgcacacgagaggtgaccgtttcccggcatctacactccacaacatcccgtatcgtaaaggccatttcacagaggagatccacagaccacacagcaactggccacaggatttctatacatgagggtcttcccgacagcagcctggtagcagtggacactggagccttgtctcaaagcgacatttacgcagtaagctttgttttcagttaggatttgttttggggggcttggaaatggggctataggacattatgggggggggcaaaacctcaccagccacccttatgctccaccctggacagactcaacatcatccacgtcaggaacacgcttttggatgtgaccccattccagccccctagagccagcagagaaggaccacccacttccagtgcggccaggtctgcagttcagtcctggagccggggaaggctgtatacgctccctgagagatgaaacaaccccacacctctcgcctcccatgctggctccattctcagtgcctcagaccagagctgggcctggtgaggggatcttgaaggaggatgggcctgcctgagagaggatagaggggcagagtttggaacacactggcagctggaacagggaggctcaaggcagggggagatggtggcctcgttgccacagaagaggcctcgagccatgctgagggaggcaggtagggcatgggagctagggagcagtgggggccacttgaggtgcagggagctgggagggaggcggtacaggggaggccaggctgggctcagggctgagcggtaattaaaggagacgtagggggctccccagggccagcggggctggtaactgacacgcgggccccattgctccgctcatatttctcgccggatcgatacgtttgactcccgacaagacaataatcgcttgtacgcggccggcgagtcgatcaaatacattattagagcgaggtcccccgggggcccggcggggagtggtgggggggagcagccagcccaccggggacagcagagcgagattcttcacccctcagggccccccagccatggcctcttcctcttggccacccctggggaccctctctgtggctcagttccccagcctctctctgaatgtctgctgctttggtgatctctctactcagcccccagcatcatccttgctctgtgagggaacccaagggttctttccccataggcactgccctcatctgtagggctgtggcatgtgggagctcagagaggctcctcagacccctagcttggcaggagacagggagaccaagcctcaggccatactctgagtccatggctgggccaggagatgaacttgggcccaagactcaatgatacccacctccctctgcccagtccccttgctgcatctaagcacacggggcttcagcagcgcccaggccaggggcagcctctggggggttagggaaagctaacctagggacccaaacaagcaggaaaacaggatgataggggtggcaggaaaacaggatgataggggtggcagacaaacacatacacaaagagatgtgtgtctgctcctgctgcagggccatgtggtcccccagtgggcctcagagaccctcaaaccatgcccagcctcagctctggcccacccgagacactgcttgccactcttgcccactttcctggcttctaggctcaagcctatttccccttttaaaaaaaattaaattaagctttagctttatttttaaagtccaggctctttttttttttttttcctttgagacagagtctcactctgtcgctcaggctggagtgcaatggcacaatcccggctcactgcaacctccgcctcctgggttcaagcgcatctcacgcctcctcagcctcccgagtagccgggattacaggtgcacaccaccaggccaggctaatttttgtgtttttaggagagacagggtttcaccacattggccaaactggtctcgaactcctgagatcatgtgatccacacacctcagcctcccaaagtgctgggattacagacatgacctcaagcctatttcctgtttacacacctgctttgccctctagacccgaagtgcccctttgcttctccagcagccctaagtcaaagtcaagttctgcttaggagtatccagcattcagggacttaaaatatatcttcctctttgtcttcattagcagcagcagcccccacagcattgtggtctatgctttccttttttttttttttttttgagactgtctggctctgtcactcaggctggagtgcagtggcatgatcttggctcactgcaaactctgcctcccaggctcatgccatcctcccacctcagcctcccagatagctgggaccacaggcgtgcaccaccacatccagctagttttgtatttttagtagagacatgggttttgccatgttgcccaggctggtctcagaactcctaggctcaaagccatccacccgcctcagcctcccaaagtgctgagattacagtcgtgagccactgtgcctggactactctgtgctatttgaaccaatatattatttctaagtcctcatgacagtctgaggaggtaaaggtctgctatcatcctcattttactaacaaattgagcctcagaaaggtgaagtctcctgccccaagtcacacagcatgagtggtggagtcaggatttaagcccaggtctgtccccctgacagcttgatctctctgtactgagccatggagctccttcttggaggcgtgaaatgctccccatccttcaggagacaacagcaacagccagccactccttgtccagtcagcaatgctggaatacctctgcagctcacagtccaacgcccacagccttcgagtcagtttcttgatattcggcaatgcactggactcctgatcccatcagctcctggctgaaggtgggccaacccttccccatttccttcaattcaaacatttcctcatgtccctcagtgccaagccctgtgctgggagctgaggacccagaggtgagctagatctaaaatctgacctcaaggagctaacagtctgagaggaagactggagtggataaaaataccttggtaatttatcacttaataaatatccaataaatgctattatgtgccaagccattgctaagctcagagaatacagtggttaaaagcaacccatagagcttatagtctttgggggagaaataatttttaaaagttatcaactagcagggcatggtggcatacccctgtagtcctggctcctctggagggtaaagcaggaggatcacttgagcccaggagttcaaggctgcaatgagctatgatggcaccactgctctccagcctgagtgacagagcaagactcaatctctaaaataaataaataaataaataaaataaaaaataaaaagccatcaaataaatatgtaattctaagttaggaaaagtgatttcaagaataggtagaggaggggctgggcatggtggctcacacctgtaatcctggcgctttgagaggctgaggtgggagagttgcttgacaccaggagtttgagacctgtctggacaacatatcgagaccccatctctacaaaaaaaattgttttaacttagctgggtgtggtggtgtgcgtctgtagtcccagctactcgagaggctgaggcgggaagattgcttgaggtcgaggctgcagtgagctacgatcatgccactgcactccagcctgggtgacagagagagaccctgactcttaaaaaaagtagaaggaggatacctgatgtaaacaaaggatggcatgttgcagaaaactgtcccaaggaagtgacatttacatagcaattagacacagtattctcgaggcaaagaatgtgaaggaagacactccaggcaatgggaacagaggaggcgatggccccatggaaacaaacagtgtggcaattccaggatcagaaaggaggcctatagagctggagcagagtgaacaaagaagagaagataggagacgaggtgtgaggtggagaggcggccagggccagatcgcacagggccttgcaggccaaggtaagaatttgggacttcaagaacagtgggacacctgagaaggtttcaagcaggggagtggcatggttctatgaacacttttgtgacaatcctggctgctttggaggccgcagtgaagaaccagaggatggagtgtgggggtcagcgtgaggaagctgatgaattccacatcaccatcaggtgatgatgacaggaagcaataattggtgattggctgaatgtggggcatgggagtcacggagaagtcaagaatgaggtccaggtatgttaaagtatctttcctggcacagaagattggggcaggtggaagagcttaagctcaggtaagaaagatcagggtaggacctgaggtcctgaaggatgaaaggaagggcaggaggtgggaaacagcattcaagggggttgccaaggttgaagaccccaaggtggagacaaacttggctttcccaagtttgtcctcaagttcctttgaggttggatttgaagttgcaggtggaaggcttctgcgcagaagcattctgtgtaaggaagttctactggggacaaatgtggggaccggctggtagcatggaatctggagacaggatgaccaatggggaggctgggacagtggtccaaggcggcaggggagaaaggagccatgaggattaggatgaggatacatattcaagctggagtctacaggaacaggatatgagaagtgggtgctgggctggggtggctgggtggatgcgaggccatcactgaaagacacagtgagaagggaagcagggggaagacacttgggtcagttccagggggaaagtcaggaagcagcatcttccaagaagcaaggtctgtggaccagaagtcagcagatgcttaacaaattcacatggatacaaacattcctcatcatatctccccaccacagccaattttccacatccaccagaattcccagttcgcctcatgtaagaaaagaagcactgtgatgtggctcaaagaagataaaagaagactaactggccgggtgtggtggctcacacctgtaatcccagcactttgcaaggtcgacgagggcggatcacctgaggtcaggagttcaagaccagcctggccaacatacaataaaaccccatctctactgaaaaatacaaaaattagctgggcatggtggcgcacgcctgtagtcccagctacttgagaaactgaggcaggaaaatcgcttgaacccaggaggcggaggttgcagtgagctgagatcacaccactctacttcagcctgggtgacagagcgagactgtctctgaaaaacaaaccaacaaataaaagaagaccaaccagtccctgttctgaaattcgccctctagtgacctagggccagccccctgaactccctggacctcagtttccccagatatatgtctgagatgggctggagaagcactctaagacttcttccagcttgaacattcttttattttattttactttatttggctcactgcaacctccacctcctgggttcaagtgattctcttgcctcagtctcctgagtagctggggctacaaccatgcgccaccatgcccagctaatttttgtatttttagtagaaatagggtttcaccatgttggccaggctgatctcaaactcctgccctcaagtgatccacccacctcagcctcccaaagtgctggaattacaggcatgagccactgtggcccggccccagctctaacattctgtagcttgaaagaaacaagaacgggtgagatggactgacggctcaactggccattgacaaatagggaggtaaagcatggccaacctactctaaagaggccctggctgggtatactcggcaacccacttactcctcactgtcatcttatgagggagagaccattatcatcctcactttaaagatgaggaagctgaggcccacagtcacacaatgaggctggagtgaacccagaggcttgttgaccccaaagcttgtgcttcagctgttttgttgagctcactgctcctcaacctggcttgtgtgagtctcattcagactgcagatcccccaggaacagggtcccttggcatccactgccatgtgctcaccagggtctctgaatgacctgtgggagcaggcgcctggccctgggtcttcctcaatgaggctctgcccttggcccaggagtccctagcccccttgctgctgcccccaggctttccacagcccacatgcgcacttcctgttctctagctcccactgggcgcagcaccaactctgcaggctcagaggccgccgctgtcatcccagcgcagggagctgtccaaaggctgaaaagcaagagcccatggccttggtccagagccctccagtcctgctgcccccaggacaaacccagtccccttactgtggcctccagggccctacaggacctccccgctggccacaggagtaccacacctcagccacactggaggaagctaattttgtccccaacatggggccttcaaccttgccagcccccttgaatgctgttccccacctcctccccttcctctcatccttcaagactccactcaaaggccactcctcagagaaaccctccctagtcatgctccactccattcccagttttatttccttcagagcactctgaaattcaattgccgcctatttgctttactgtctctttcaccctctaaaatgtaagctttctgaagacaggtgtccttttctgtcttgttcactgtggtattcttggtgctttaacagtgcctggcatatagttgatgcttgaaccttacttgttgaatgaataaatccttccaggcacccatggtccacagaataaaatccaaggctggctctccaaacccaagtggatatggtgcctctcaacctcctcagctatctcaccctcagagctcacctttctcctctgttcaataacttgggctcccctatgtgtcccatccctcatgcctgctttgtctgccacaaattctgtacacaccagcctctgctcaaatatcctctctctggaagccttccctgacctcagtcttgccacagctccaggtagtatccccgggctttagcactaattgtactgcactgaatcacttcccaatgaggctgtacctacagactgtgagctccttgagaagagggctcagtttgacatgttcttgtagactcagcacccagcactgggcctgcatttagctgaggctccaggaatgtttgttgggtaaggacaactgccctgcagatggttaaccatctatacaggtgaacataatgactagtttggtagtcaatcagatgagggtttggaatctggttcctccattcatttgctgtgtgaccctgggcaggtgacttctctctctaagcctcaagctcctcatctgtgaaatgggggcagtaaaattggctgacaggaacttaattaatctttttttttttttttttttttttttgagaaggagtcttgctctcgttgcccaggctggagtgcaatggcacaatcttggctcactacaacctctgcctcctgtgttcaagcgattctcctgcctcagcctcccgagtagctgggattacaggcatgcaccaccacacctggctaattttgtattttagtagagacggggtttctccatgttggtcaggctggtctcgaactcccaacctcaagtgatccacctgccttggcctcccaaagtgctgggattacaggcaagagccaccacgcctggccaggaacttaattaatcttaaatttaatatttgctaccatgccctaagaacaaacatgttcactaactacatcaagatttgaggttgagaaaaataagaaacagtctagatgccaccgataggacagtggctaagtaaattataatacattcatactcaggaatactatgcagttatgaaagagaatgagactgatctatggattgcggacatgaaaagttctccaagacactgttaagtgaaaaagcaagttgcagaacaatttatacaacttgatatcattgatgtaaaacacatacatctatttttaaaaactgtatcttttctatgggcgtacaagtattaagcaaatgcagaaaaaatggtctggaaggtaactaattataacctcttttgtagtaacttcagttttggtttgtttgtttgttttgagatagagtctcactctgtcacccaggctggagtgcagtggtgtgatcttggctcactgcaacctctgcctcccgggttcaagggattctcctgcctcagcctcccgagtagctgggattacaggcacgtgccaccacaccaggctaattttttgtattttcagtagagatggggtttcaccgtgttagccaagatagtcttaatctcctgaccttgtgatcctcctgcctgggcctcccaaagtgctgggattacaggcatgagccactgtgcccggccagcactttagttttaataatgagattgtacttgttttttggtgggggtttggggtttggggggttttttatttgtttttgtttttgtttttgagacagggtcgtctcactctgtcaaccaggctggagtacagtggtgcaatctcagctcactgcaactgccaccccccagcaagcaatcctcctacctcagcctcctgagtagctgggaccaaaggcacatgctaccacacccagctaagttttgtactttttggtagagacaggatttcaacatgttgcatgggctggtcttgaactcccgggctcaagcgatcctccctcctcagtctccctacatgctggggttatagtcatgagccactgtgcctggcctgtactcatttttttaattaaaattagaacatattaaatgatacacatgcagaaaatcaaataaatgattatcccaaaagtgagaattgtagttacctccagcagagaggaaggagtatgtttggaaagggacacacggggtggggcttctgggtgcctttgacatctccacccaagtggtgaatgcacagatgttcactcgatcaagattcattaaactggccaggggtggtggttcacacctgtaatctcagcactttgggagactgaggctgggtcacttgaggccaggagtttgagaccagcctggccaacatggtgaaatcctgtctctgctaaaaatacaaaaaattagctgggtgtggtagtgcatgcttgtaatcccagctactcaggaggctaaggcttgaacctgggggctgaggttgcagtgagccgagatcaagctgctgcactccaccctgggcaaaagagcaagactctgcctcaaaaaaaaagaaaaaattcattaaactgtacattaacgtcttgtccaatgactgtgtgcttcctgtgggcaggggccaatcattgcaatatcatctgtttccccatccccatttcactgcccagaaacagacttaatataagttgtgtgctcagtagggagtgcccatcacggcaagcgctcaggagggccaaggccgctgtccagggtactaacgacccaagcctgggaggccacagagaaggccagcaaagcgagccagcttcaagatgcctcattctgaagggcccctgcccacctcaactcctctctccccacccccttcactcacttcctccaagctgtctgcctttctgttcctgcaatccacgcccgcgcttcttcttgcctcaggacttttgctcttgcccttcctcctgcccagtgcagtccttccccaggtgttcctaaggctcgtccccttacttactccagaattacacttaaacaccccctccacagagaggccttttgacatcctgtctcacatggcacttctcatcactacgtcctctaccaggttgcactttcttctagcactttttgctgtctcaccttcaagcctcgtgtcacgtgcttgtttattacctcttttcccccaaactgaatgtttatgccagcacagggagcatgtgtgtcccattatgtctcatcctgtcttttagaaggatcccaggtgcacaaaattggattaatcataatccttggttcacagcgtactcccatcactgggctggatggagccctctttctctatccattcacttattgttttacttatttttaataatgagttaatgtgaacccacattcaccattcagattagaaccatgataataatcatactagcctgtgtctgtcctcttcactgctgtgtctccagcacctgcaacccaggaggtgcttggtattgatttattgaagaagctgacaaaggggcaatgacctccacaccctgcaaaagggagctaatgggagtgcccacctggcctcacaaggcgggagaagaaggcaaaggccaggccctccactcagttcccctgtcctcccctggtgctccactcctgctcagcctgggcaagcgcctcttccacacgattcagttccacatcttcagggagggcccactgtgccagaccttgtgccaggagctagggacacagggtggctcagcttggccatgctcctgaggagctctcaagcctcgatgctccaggcccctagaccatcccactattctactaagtaacaagagcagctacatggcacctgctctgtgcaggcatatgttatgtgtattctttgcatcatcttttggcatcttcccaacaattcactaaagcaggggctgttattatccacccccttttcagaggagcaccccaaggcgggtcagagagggcaaggacttgcccagactcagtcatgggcaagccaattccagagcccagctctccttgccccaggccttgctgttacactgatcccatgcacatttctcttcctccaaagtctgtgaagtcctgggcctcttgcatctctgcaaaagcaactgaggatggctgaaaaggtgtcaactttagagtcacataaataggtagttaagtcccagctgtggggctaggtgtggcctatgtgtcacttggcccatgtgtcacattcctgaggggatgaaattaaaacaaaatgtgtattttttactttatagttgaatgacactgccagaccacaccaccagtaagatagtatgcattttgttttaataaatcctgaaatgaccttataaatatcagttaacgtggcattttattgttgtcattgctaaaagcacaggtctgtaaatccatttcagtattccttcgttcttagtacactaggaggctcaagaattagaagctgccttggcctctctcagcctctgcaaagactgctgagtcctagctgtgcaactttgagcaaaccactcagcctctctgtgcctctctcagaactgtgcggaccctgagcagcatccacagagggccctgcctacagaaggtgctctacattgattcagaggagtttaacttaacggaactgtattagcccagatcgcatgagacacagtgcctgtcatcgttgaagcaaactctgagctctggacatttgaaggaaagtgagggatcaaggaagaagtctaggttgttgttgtgacaaccatttactgagatggacacaagctcttggaaaagcttgggagagggaatcaagagttctgctttaggctgggtgcagtggctcatgcctgtaatcccagcactctgggaggccaaggcaggtggattgcttgaggtcaggagttcgagaccagcctgaccaacacagtgaaatccgtctctactaaaaataccaaaattagctgggcatggtggcacacacctgtaatcccagctactcgggaggctgaggcagaagaatcacttaaacccgggaggcggaggttgcagtgagctgagattgcgccactgcactccagcctgggtgacaaagcgagactctgtctcaaaaaaaaaagagttctgcttcccaggaggtggagcttgcaatgagccgagatcgcgccactgcactccagcctgggtgacagagcgagactccgtctcaaaaaaaaaaaaaaaaaaaagaaaaaaaagagttctgctttagacaagttaaagagaagccctccacctactattaatatttagaagcattttctcactgaatcttctcaatactctacaaaaaagcattgttaacatccccattttacagaggaaaacactgatgcccagcaaagttaaatcacttggctggagacacagatggaaccaggattggcacccaggaaaccggactccaaagtccacattgccatccactgttctcttcctctccctcaaacccttgcccaccctgtcccattggctcagcagaaacactggccttggacctgggctttgctgtctgagacatccatgtatctcccatccccgtccccagttatggccttctgccaatatgaaccattcactgagtgccttcacatcacctgcccaccttgattcacaacaattctgggatgcagattgcacaatgctccccagctccactttgtggggccctagcagattctccgagctcatacagaaagaccagctgtgaggggagccaacaccttcaaatctactcgctccctacaccaccttactcagagctcacctcctctgtggagtctcctaagggaaggcccccccattcacatctgtgcaagatcccggtctggcaagaaacttctcagtgccaaccaggcactttagggttcacatggagaacattaaatataagcaacccaggcatctgcctcatggaggcttcctgcagcctcctagggaaaaagtagcacctgacctggtaagaggaaaagctcaggtttggaagggtcagactctcactctctgctctccacttctttgagccttgatattgtcaccaattccaaaagcgctgtctgattcctccactcctcccactgcagtccaggccaccaccacctctggcctgagtgacttcagtggtctcctccccgaaggtgtcccttcttccatgcctgtctcagatagtctcgtctccccttggcccccaaagggggtctttctaaaacgtaaccaggtggtgtcactcccttgcttaagattctccaggagcttcccatgcatttgggaataaaactcaatcaccttaacccaacctataaagtcctatgtcatctcacccctgctgacacctctcatctcttcccccatcactcacctctttgcctaccctgctccaagccatgctgtctcctctctgttctttaaaccatgctctttgcaaccccaggcccttcgcatgtgccattccctctgcctggaacactgttcctgtgctctttgccccattaaatcctactcgtcttttaaggtttggcttaaataacttgccctctctcctggctccctattctagtttattctttgggatagacttatcagttcctgattttgtatttgattgatgtttacacttaaagatctgcatcttctctagttgtcaactccatgaaaatacaccatgctggttctgctgcctgctacatctttagtgcccaacaaacgctgggcacatagtgggtgctcaacagacaggtggaatgaatgacttaaatggatcctgcatagggacaagcacctgaggcagagtacttaagtcttcgaagcctcagtttccacttctgtaaaatcaagataataattcctcctttacaagatagtggtgaggatccaaatagtcaatgaatattgacagtgcgttgggaaaaaatcctctgcaaatacaaaagcttaaagacctggaacctagaggatgggcaggagtcagagagaagagcaacaggaaagggcatggccatttatcaggtgacattgtgttttgtatttcccctttccctgacccctatgaggtagtagttatgacccagaggaggaaataaggctcagacaggagaagcccccttcccagggtgtcatggtgagtccatggaagagccgggatttgtacccctcacactgaggcaggcaaaatggtcattgcaggagaagcatcccctgatctcttgcccccctcttcatccttcgcccccaaagccctcacctctttccaggtttcctggtcttggcctgaatctcatactcctcagctgatcctgccaacctcatctccaccccaagacccacccagccctgccccagctgacacctggttcttgtgctcacatcctggcctttcccacatggcccagagggacctttctgtcttctattaggaaggccttgtactaattggaaaacttttgtttgacggtaatgccaaaaaattcataactagtgaaaagtaagcactgtttcaggcataagcaagcatatagcatgtgggtaaatacgtgggtctgtacacgcctttgaaacacaaatgccgtcttcccacatcagagggatctctctaacacagagatcctcactcccctccgcaaaccaggtagctgtgaggccagaggtggggaactgtgaaagctgcactaatgtagaccttgttggtgttgggtggaggtgactggtcctaggtgaaggagagaggcttggaaaggacacccagggtcatcctgagatcctcctcatcctccaaatgcccccatctgtcaacttcccctcaattcaacccaaagatgtctgaatccctctgctcctccggctgtgcctcccactcaggacttgctcctccccaccccaccccaccccagcctctactgttgcacgggttcttcctcacttgctccacaaatgtcccttgaatcctgtctgtgtggcaagcaatgaaccagacaccagtgatgtcacggcccctgctctggggagctgacaatggacatggacccaggcgtcttgaatccacgccccatgttccttaaagcatgaccctggttgggcctcgctcccacccagaccgagaggaaaaatcttggcaccctagacctgcccacgtctgcagcttcaccttcccaagccaccatgagaaggagagaggaggggcgaccatgttccccagcctgaagatcctgccctcaactccctccctaggagacagaggaccctgggctttcaaggcaacataatccacaggggaggccgtaaacacccttggagtagctcgcttttcaggggaaaccaaggctcagggccagcatgacttgagcaaagccacacagcgcgtctgtggcagacagatgggccccacccctcagttcccagctccatctctgcgagtgtagacttgtttgaacttccctagacactgacactgccaagagaaagaagaggggcttaagaccctttttctgcgtgttctgctgatgttccaaggacctgagcctccacttctttctatggctgtgggaggggagatgaaccaagagagatggggctagacaagggatgtggggcgcaggcagggtagaaaaagacagagtgaaaagcatacagcagggcagagaaaagaggggtgtaaggaaagagtaactggggactatcaaggtagaacagagaagtgtatgggggtttttaaatccctggagggagaggcagcaataaaggaaagagagtcagagtcaaatagagagacagagacaggaagatgcagataaagaggtagagagagagaacagcagaaagagagacaaagaaaacaggagagaaaagaaagagggagggagggggaagagcaagcagaggtggggccacaagggcctcctgtaaattgcttcccaacaccctctcccctgcccctcacaccagcagtccagcagggtgtgtggtgtcgtccccatccctgaaggggctgctccgggcagagctgagactgacacatgggaaggtgtccagctcccggccctctctcttttcctgcacccagctgcctcccaaagaaaagggccaagttcagtgtggaaggggcagagacaggccctgggggactgagagctgaagtgctgtaaccaggggcagagaggctgcagtctgtctcccctcttcagtgcctggtccccacagacaccctacctgttcttgtcccctgctggctgctgagggacaggctttggctatcctgactttggccaatgcctccctcaacctgtggccatcgtctccctgcctggtgaccccaacaccctcctgtacctcctcctacccatccctgtgccccccaagaccacccatcccatggccacctttctgctcctctgcaggtttggggttagggaagggagcacagaggcctagatggggggtggaaggcttggtggattattgaagatgtgcgggcactgcggctgacatggatgaggaggaagaggagggggtcttggtgatggacgatgctgatcctgcggtggggggaatggcaggggagggggtggagagggctgggggaggggtggtgaggaagcaggttcggaggggagcaggaccaggctcacatttggcattcagggcagctgacaataaaaatgctttattgccaagaaactggatcgatcggggctggagggggccggcaggggggacgcggagggctcagcgcagaggccggcggccggccttcgcagcgaccagggcccgagccgccctcccccctgcacccccctccctgcctcctgccctttctctctcctgcagccaccgcttagttcttattatattttttcttatatatttttcccccagcttctcctgctcctgtttttttattcttttaattttttttaaaactcgctgcactcccaatgccgcaggccgggtgggggtggggtgggggcatctgcctgggccaggcccctatccacagggtgcccagaactgctggctctgggatgagccccactttgcttctgtatcccccaatccaaccaggctcctcctagagcctgtcctctgtggatgcccatctccccctgccacccctccaaggggcctccttccaacctcagagtacccacacacacatatccatggtgggctgagggccctggccaggccttcctcccctcccccctacctggccccctgctcactcccggagccatttggctgatggtcagaactgtctgtcaaggtggctctgagcccctggggacccagatgggaggagggagggggagaggtcgggggtcaggccacgtcccctcagcttgtctctttcccctcccccttcctaacaaagggagcatcggcctgacactggcgggatggcctggtactcagggaagcggggaggagaggggctgtggggatggccatgggcagaaggcgggggtgggggccgcctgcccctcctctgccctccccctcgggtcaaggctaaggtgattcctcaacctctcggaggctgggctgggaggagaggaggatctggacagacaaagaactggagccctggggagttgggggctggggggacgcacctgggaccagggcagtcctggctgagggaggggcaacaggcacccctctggccctgctctcaccctctggatggccctgcctcccatctgtaccaatccctacggatcccagagccatacagaccttccagcttgggcaaggtcggatgggggtggggggaaactgaggcccagagaggggagacggcccaggcccagggttctcagcgctgtcccagagtctctcccctcacttctcttcctactaagggaagacatcttcctctcctgccctcccccacccaggtcaggggaggtttggtgggggcagatggtagaaggttctatggagagggaagaggaggctgaggaaaaagtgaggctaagcgttctcctctcttaagccagtgggcaggggaggaagccagaagagaaaaagtctaaatgtgaccttgagcactggcctggcacagctgtgggaagaaacttaacgtccgtcagaaagggcaggaaaccaacatagacagggtgctcctgagtacctggctagcggtggctggggaagaggccttcagacagttttccccttttgcccatggctacagtgaaggaggaggattcacactctggttggtcacaatccacccatgacactgcgtcagggcctcccatccacccagcctgactgtggggcgcaacgggtagctgaggcaatgaacagctgtgagcccccatgcccacagggatatggagcctccaaagagacagaaggaaacaggcagatcttctgtgcttaaattctcctatgaaggctgaggtgactctcggggagagggccgcagcgaagaagaagagggggagaataaggcgggcctcttttggagggggtgggatgggctcacacatgcccccacagcctgccaagaaggccccagatgggccgaggactataggggtcccggctgccctcccccaaacctcccctcccttctctccctctctctttctcggctggctatcgaccggggctgtgacatggtggatcaatacggcagggatataaagccggctggctggctgcctgcctctgcctctctctctctcccttgcttgccttgcttccttttcccggagccgcacccaggtcccccaccatcatgtaccccttacccaggcctctgaggggccaggcaccccccaccactcccctacagcaggagagcttagggaggctgagagcttggacagccgggagagggggtgagtatgggagtgggcaaggaagcagatggggatgggggccatagtttcaggtaagggggctgggagaaattgagggacaatttctgggagaaagcaggcatcccctcaattgggagcagctcagaaagatggggccctttgaaggtgtgtgacggacagagctctgggaggtgggcagggggcacctgtgggttcagagagacactgtcctgagcccatgaggcaggggaaggtctggggtgggtgctggagtaggctacggtgaatggacacaaagaacagtggggcgaaccctcaggccggcctgcgcccacccccagagctgctggctgccccgcctttgggtccctgcgggtagaagttgccttggcctcaccccagggtctggcctgcacatgtgtggttggggtgggaagcttgtgcggcttcggacaggaggttccagcgagaggtctgtggtgtgcgagctgccatggacgcagggtgtgcatgtgtcctcaggctctgctgggggattctaggactgcacatacccgagcgtcttggcccgagtcatgtctgtgtgtgaacatgagttcatggatgtgtcccaggagcactgggtggctgtgtatgcacttccatgagtgtttccctgacgctaagtctctgtctgtcccttggggatgtatcccaggaacacctcagggatctcctctgtccccagttaatggggtagctatgtgttcccatgtgctctgggaagcctgtgtgtgttggcgtgcgcatgcccctgacagagtgtgtctgagcacggatgctgctgtgcgtgagcctccatgggtcccgtgtggatctgtgcctgtgcctgtgggcagctgcgtgtgcttcagggatctgcgcggtggtctctatgtgtactggaagcaggttctcctcatgagtgtcggagagtccatgcggtttctctgtgtgtctatgtgatgctgtgtgtccctgtgtgccgatggtcgagtgtgtttccacaagtgggctggaggctctgggtgtgtccctgtgtgtgtcatggtgacttggtgtagacggcacggtgtatgtgtgtagaggctacaaccctgagtctctgagtgggggagggtggcgaggcagcaggggctgccacggagacactggctagccggttttatcactacatcatctccaaatcccaatgtcagggcctgcctgccttctttcccttccctgccagagaccccagacccctgccaggatgggcccaggcccccgtccctcccccggcaccttgggcaggctgtacctctgctcctcaacacccctgctttggtggatgccacctcaactccaccaagcgacctccgtccctcccaacccccccagcgccacccgctccccccgccctccccccaccacaagtccagtccaacccagacaaaagcaattactccagaggtaggatgtgagtgtgggtgttagaaacaggaaaaaaagggggggacagggagggggagcgagagagacacaaacagaggcagggatggacagccagagaccccgagagacgacaagagaaagagaacggcagagtgagagacagaggcacacgcagagagatgcacagagaagcagagacagaagatgaaagagactggaagggacacagacaccaaaaccaggaggcaaaggcagagaaaaagagcagaggaagggcaaatgcagagagcacgacagagagagacgcagagacagtgactggagagacggagagagaaacagagaaagagcacacaacagagcagaaaacccagtgatggagccacacagagagaagacgcagataaagagagaacgggggccagaggcagggagaactagaaagggggcaatgcacagagaggaacagaaaggctgagtgagagtgagagagaaaggagaccagagagataaaaggcagacggcagatagtggtggaggggagttggtaacccactagagactctgagatggcaaagctagagagaaactgaaaggggatcacgtccaaagtgatgtctctcacacacacacacacacacacctttctccccattccccaggccagaagtcagggatgctcaagcctttttccacgttcctctgggcccctgtgagccacggtggggaggggacagggtgaatggacagggatgatctcaggtagcttcagggaccagccagagccgactgggacctgatcacatgggtagggagagcagtacatccctccttaccacacaccgccacctcaccctccacacacagtccacacacaccagggccttggccaatttcctcgtactctgccaggcatggccagcctggggggtggggggccaggtgtgaggtccttccttcctgccccacagtcctgcccacctgcctcagctgcagctgccccgcactgttttttctttctcattgtcccctgccttcagcccggctgccttcatctttctctgatgcactctcatgcgctcagctcgcatgcacgcgccctctctttctctctgttcctttctgtctctgagtccctcactctgctttcctgcctctgacttttctgctgtttcctcttcctctttgctcctctccgttgctctgttcccctctctgtgtttctgtcatgaggtgcatgctccctgggtctccctctccctccactcccatctggtgtattctggattcccctttcttagacaatccctctggccctcctatccacctcgtccccaagaaaagcaaggttgggcacagtggtcctagcctgtagtcccagctacataggagactgaggcaggaggattgcttgaaagtttgagaaaagcaagggtggatcactgtgtaaaggacctcagaagctgtcctggagtgctaggagtgggtgaatacttcctttcttgtttttccctcaatcaccttttatcctcctctctttcctaccccacctcacacccaccccaggccggatctctggatctccccagcctccagatctcagtgtggctctctctggagacaaaagctaagactcaacccacaggcaacactcaacacagagatccagctcagaaaaaaaggagctgaccagggaggaatggagaggccaagacacataatgaagactaagaaaaggaagaaagatgatgctggggctggagccaaagggagaggaagaggaaaggaaggaaagccaggggcagagacctggcagggcagcgtgagcccaacaaccacggggtgggggtggggcgcgcatcaagatttctaacaagcgcagctgaaaacacccagggccgttctctgaggccttctctctgcctaccagccctcaccagtgcttcgaagagccctgaggaacgtctctctatttgaagtcagagccgagtgcctgctctcggcacctggggctccatgcttaccaggatggtgggtacttgaccttcatttgctgtgggactgtcagggattccagggacccactggtccccgaactggctcagagatgcaagccatttttacctcctacacatctataatccccaccccatggctgacaaatattcccagtccacagctgtctccacccacccagtgacagagcacaggcagccaaaaggatcaagcaatctcttgccacctcccagcaccccagaatgctaaacagaccctcacatctggactccacatccagcgaggagtgcccctgcccaccacccagatcacacagctgccagttacagaccaccctataggtcccaccacacggccatagcccaccagcatcccagagctgcctctacactaaagctctgtcccagcccagccatccttcaagccacatctggaatagcacacaccctattccactagccaaagcccccaggggtgtaattcagaaggaggcagactgggcctggggcatgtggacaagtccctgacaccacgccctggcttctccggcttgtctgaagaacctgaactgcccttaaggcctgcgcctcccatcccagggcagcccccccgccatacctacactcttggccatgggagaatgtcctcatgtgcggctaaacatcctcctcatgcagccttgaattctgttccttccacgtcacctcaccagacccaggatgaaagccgctcacctagagcaaagcttctgcttccgaggcattcaggactcccctcagggtgtgtgagcaccctggggcacatgcctgttgcttatgtctgggttacctctgtgaccctgggaccgctccacattgaaggccgttgtgtctttttgtggaaggatggaaggacagaagggaaggagagacaaagtggtaccacagccctgttcttgccctggcacttggagggcaccagatacccaggggactgtagctggctgtgaggactctaaggccaggccagcatacacagtccccaatagtgagtaggagcccagtcagtccacaccccttcccatccactcgaaatgtaacttagccctcggcttctccttacctttcaggagttctctccttacccccaaagacttcctgaggaccccctaggccagccagcctatccctctctcccctaacccagcatcctgcagtcccctggttcagattggtggtgtctgtgcctgaacccccacgagcctgaaagcccctcaaaggccacatgggtctcccgcctctctgcatctccagatggtggcacgaggcctagcacacaaggaatcccagaaaatgttggctgaaggaataaatggatggatctaggtttatgtgtctgtttgctcacttatttattcattcagctcatgcttgctgagcacttacactgtgccagggactgagtatagacagatgtgttagacaaacagagaggtcccctcacccagaggcttctgagagcagacattaaccatatagaatataatcagatacggtgatagtgctcaggagggaaaaggaggcatcatccagcccatgggtcaagaaaggccctcagagttgaggagccttagatggggagctgaggaggtagagaagtgaagccaacccagagtggagagaaggccctgctgtgggtgggaggagatttggaggaagggccagaagggagaggaggagggggagtcacacgggagcataggcagcagaggccaccacaaccccagggctgggagggggtctctcactcatcctggggctccagctcccacatagagcattgaggaggcctccagacatgtttggggcatcactcaccttccaagtgtggctataaaggaaagacagagcaggtgagggcgatgtttattgtagttgttgtttcgtaacaaaactatacacctaaaagagtatggcttccttcaaagatgtctcctcaggaggccgaactttttcttgaaccacctgatattttggcaacagccttcaaggccagtttacaaactccatcagcaaagcatctctctagtgtataatcatctctagtttctattgaaaaaccaacaagtggccccagtattatcattgctaaattcatcagagctgctgctaaatcagacttcaggtggtctccgaaatcaaattcactcccaaagtgcaaaaatttgccacactgtggagataccaaaaacaatggtgggttttggtgaggtaaaagaatgagagctttaaggtcaggcaaacccaggttcaaattctaactctactgcttacatgttgggtggccttaggcaagttgccttcacgctctgtgcctcagtttctttgtcttgtaacaggtgccaacacccacttcacagggttgctgtgaggattaaaagcaaagtgcccagaacaggcccttgcacaaaggtggcccctaataaatatcagtttcctcactggaatgtaccagccctgttacgtgttaccaagtcagtcacccacatgtccatgaaatcatggatatttaatgaacatctatttgaagacaaataattgaaatcatagacctaacagtgacctctaccaactggaaacataattaaacccctctgttacttcagcccaactttcagacgttcctcaaagccagtctctagctcccaaactaattctgcaacctggaaattccttgactctcttttcgaggatgtgaggattcctggaaaaactgcaacttcggttccctggagaaagcactctagagaaatgacacatcctggaacaaacactctcagcgataacaggggtccatgaatgagcttcagggggtctgtgatcatcccaaagtgtagcacaactgggcaaatgtaggtatgtgttttcctgggagaagctctatactgttgtgaaactaggtatctatgggccaaaggttgcctgaaatatgttgtttggaccacgaggagattttgcaagttttgcattagttgccaacatttaaagattggaagacttcacacacaagtctgggttcctggcttctcttgaaaaatcagaaaccctggcaagtcagggttgcatctgtgcatgagaacagtcagtggagctaaaaagcagtcccccaccccatgcatttttcagtccatcatagtccctacaatgctgggttgcaaaccctgggctacagcttccatctgcttcttaaaatgagactgtgattcctggtacagcaaaggactcctacccaggagtcctacaagggcacccaaaggcctccctggggtcctgagacctgtgggttaagcttctctggtgggaataggggtggcagtagagggctgtcccaccccagaagccctgtccaccctcctccctagatgctcattgccagggcctcaccaagcaagctggagcaaacaccagggcaaatggccagagcccctgcttcccacagaggtgagcagcaggagaactatggcttctacctgggagtctcagtgggcttcagggaggggcttcataaaaccttctttgttcaggggaacgcttccagccatattttgagctcccacttcctgcagccacacgatttcaaggaataagtactttcatcttcacgccacctccatgtggtaaatgctattaattaccctcctttgacagatggggaaactgagccatgcccaggatcactcagccacctggctcttcttcctctatctccttttgctctcaggatggcacttaaggtgggttctattagtattcccatttacagacaaggaaatggaagctcaaactttcccaagtccctcgaagtcaggaaaagagattcgaacataggtgtgcttgaacccaaagctgtgatctgagccaccgagttacccccatctctctcctactgagccgtaacactgatcagcagaaacacccacagtcatcaacaccaagaaccactggtttggcccgaaagccacaggatgcatggagggtgagaacaaagcagtcagattctaacctctgggtgggcagagtggagaagggcagcaacacacccagggtgaggccagagacgaggatgggaaagcagagacttctgtgagaaaccagaaggtgcatcaataagcaaaactctaaggccgtggtccttacctcttgggcagacgcagcgaagctaatacattcaggccaccaacccggtccagtcgagaacctggagagagaggagaatgcagtcaacatcccggagaattccccatcctcatgcaggatgatgcactcctccagtggaggaaccctcctcctgtcacatcatcaggagctgcagttggctaactgtggagtcaggtgcctggaactcaggtccagtcagccacttgttgccttcagtagtcacttctggcctctgagcctctgtgtccccaactcataaatgggcatactagtgcctgccactgtggaacatctgtttttcccatcagactggaagcttcttaaagtgcagggactgtaactgtgtcttgaagcttttgtgtttggcagagggcctggcaaatttgagatgctcaattagtgcataacggacgacggagtgaatggatgggtggatggaggaattaactgattaaatggtgtatctcaaaggactgctacgaggaacaaatgagaaagaaatttgaaaaggttactcattattaagttcctatgtgctctggggagattaaaaataaaagtcataatgatatttctgacttgtacatttgtccattcatttgtgcatttagttcatcaacaaatattgagatttctctggctctgaatcaagtgtggcaggggacagagatgaattagacaaggtctctgctctattacggggctcacaggcaagttgaggagacagaaggaagagccaatgccaacatgctggggtaagcagagggtgctgcgggcatcctgggtgagatcacagaagacttagggaggaaacaacacccaagccaaacctggaagacaaattttaatcagagaaagaaccaggtgcaaggaacgagagaatgccaggactttgcctgtccagggttcagtaagaaaaatggggaaagacgaggcttccagattgcaggggctgctccctgcagggcgtcaagtgcctggtccaagcagccagggcttcgtcagagagggagagggatacaatccagtttgcctttggaaaggtccttctacctcctgtgtacaagatggagagaacagagaagtaggcaagaggtcaggaggcccatccccaaagagggtttgctgagcctctccacagccctgtaggaaggaggagtgaggaattaagggaggcaccagagttcaaaaggaggaggaggagaaagaaaaagatggactgagaaggagggggagagagaaagagaagagatggggagaaatagacagagaggaatgaagggagcgggggcaaagagaccagggaaaagcccaaacaagaagcaaaaggggggtaaaaagggccaagggtctccccacttcctcctccatctgtcctgtctctccctgggccttcatcttcaggggcagaaggggaccagaacccctggtccctgaggggagggaggagctggggttgctccccgctcaggggctgcttccccccagcccccgccctggagctaatcagcggctgtcatctccacagtgaggtcttggttaaggagatttagggccgggatcaataggaaatttaaaaatcgatgcagcgcgcagggcaaaatcgatggcgtttaatcgccttgccgattcccagtcaaaacaattagccgcgctgagtgttgaacacggtggcgacacggcattaaccgtcaatattggtgtaagtgatggggtgggcgagggaatccccaggcctcgggggggccagagtcagacagcgccttagggctggggtcttcccccaggcagtgcccccaccttgggcttccctccagcagggcccacacttgagtctccctgccctctgctacctggggctgtggtgcccataggcagcaccatccctggcatatctgcttccaactctcatcccatctcccgggttcccaaaccccaatatgccctccgacagaggggagaggatccctctcccaagcagacaacacctccaagtagagagacagtccatgggatctaggagctgtattcccagcagtgccttaagactgggagctatttagaagatgtcttcccccattgtacagatggggaccctgaggaacagagaggggcagcagctggcccacagttaccaggcacaggaagagtgggagccagaatttgaacctgatgtgtctgactccaaagcctacatttcctgcagctgtgcacataaagggtagattccagtgttcacagagggaaagcaagctcagggtttggtcctggcccctcaagtctcctcacagccagtgtatataatggtttgctgtgtcctggggtcagtttgccatgtacatggcagactgtgagctccttgagggcaaggcagggcctggctcctttgggggtccgaagcattgcccagcacagggaatgaccccaagccagggcttgggacaggcctaagaatgatgacgccacttgcccccacagacacagaatgcccacatacaaccccaccgatagacagatggaaacactggcacccacagacacatcagtactggcatttcctgagtgctggtcatgcaccaggggtgggtcattgctctgcaggtgtgatctctcagcatctcacatttgttcggcgagtgtcatcccatgacactgctgtggaaaatggaggctcagacaggtaaagtcacttgctcaaggtcacacagccaagtgggggcacctctatctgattggactccgaggggcatgggacatacagcaaacaagatctaacgactatgagcaagagaggtggatgcaaggagaaggtacaggaactgggcacctaaacagagaaccaggaatggcccacaaagggccatggggctcccggttctggggtgctgtgttgggagagagaggcttctgtggccacctgctccctggagcagaagaacaggagggagtgtgtgggcagaggaggaggcccacgagatgagccagggattgatctgacaaggtcctaatcaaatggtcaatatcactgacctgaccacttaacctattgataagctggcaaggatggagcaggcggtgagtgggctcagggaggggggcagcggaagggatgagggaagcctgagtgggcaggacataggccggcatcacgcctggctctggggcctggaagagggtggtctcctcctcaagggcccctgctgacacggcacatgtcttatgtcttggtggcttcctctacccaggcttttctctcctctcgggatccctcagtccctccctgagggaggccagggactgttgctggcacccaagtggtccccggctcccctctgactgtgccttagcttttcacacatgtgagaggcttcacatccaagcctcaatgtcttcatttgtaaactggggataattataataggggaaatcaaaaaccaacctagatatcatatgagtggggactggtacaataaatgatagtatagtggccatacaaagaaggactgtagagttgttgaaaacatgtttgaaataaatttttttttacacttctctcagctcataccatgaaataaaatcattgacaacgaaaccatgttcataatctgttgttaggaagaagaaaaggcaagttataaacaagtatgtagcatatcatcccgtttttacaaaatacacatccagatggttcccccaccaaaaataaataaatttggaacagaaatcagaattctgagtttggaccagtctggccaacatggtgaaactccatctctactaaaaatacaaatattagccgggtgtggtggtgcgcctgtaatcccagctactcaggaggctgaggcaggagaatctcttgaacccaggaggtggaggttgcagtgagctgagattgcgccactgcactccagcctggacgacacactgacattctgtctcaaaaaaaaaaaaaaaaaggccaggcatagtggctcatgcctgtaatcccaacactttgggaggccaaggcaggcggatcacctgaggtcaggagtttgaaaccccatctctactaaaaatacaaaaatagttagctaggcgtggcagcagacacctgtaatcccagctacttgggaggctgaggcaggagaatcgcttgaacctgggaggcagaggttgcagtaagccgagatcatgccattgcacttcagctcaggtgacagtgcgagactctgtctcaaaaaaaaaaaaaatctgagtttgggtcccaggtatctaaattttaataaattatttgggtaaactcatagccataatctcctttggagaaaaaaaaaaagctaagacagtcagggtgcaatggctcacacctgtaatcccagcactttgggaggccgaggtgggcggatcccttgagcccaggagtacaagaccagcctgggcaacatagcaagactctgtctctacaaaaaatacaaaaattagctgggtgtggtggcgcatacctacagtctcagctactcgggaggctgagatgggaggatcacttaagcctcagaggtagaggctgcagtgagctgagatctctccactgcactccagcctgggtgacaggctatctcaaaaaaaaaaaaaaagacagatagcaaaaggtaatgtcctttttgttgttcgtttaactagattatcatggtcattttcttctcatctcattgaatttctgttttctgttatttctacaatgaacatgtgtcacaccatttgtctgtaattgacagactgtggctaggtacttagtggaggcacctctagtgctgtttctctgcttccctctccctttcccagccaggcttgtcttatgtcttcccttatgtccaaacccagcagagttcagtgccctcaagaatgtgaatgaatttgaagtctgctgaatggagaagagctcactcctctggcttctgctctcaatagagtgggcggggtagtaccaagccaaatacagtcccctgtcccctcttcaggaaactggctgagggcttacagacaggaggaactgctggagggaaaacgaagacccagagggagggaagggattttcccagagctactcaactggtcatgacacagctgggaccagaagctggggatctgggctcctggatcagagtagtgccatccaactactgggagggggacaactgcaagaacaagtgtgcatgcagactcctgagataatgtgcacttctgtggggcagaagagcacagtgggtaaacatggggtcggccacttcctcactgtgtggccctgggcaagtcacttcacctctctgagcctcagtttgctcaaacatagcatgaagataataataacagctgcctcattttgctggtgtgagaagccaacaagaccgtgcttatagggaacttagcaaaaggccttacacacaaaaaaggggcaatgagtgggagaaattaatactattaccatcagcagccataaatgctgtgagtagtaagtgaaggtggtgggtaggtaagggagaaggtttgtcttggtaacctgagcaaatgaacaaatgcaatgaagacactcagctaaatatattcctttgttcattcattcattcattcagtaagcatttcctgaggccaattctaggccagatcccatgctgggccctgcaatccagatatgaacaatgagagctcccattaggttggtaaaggggaattaaggatggctggggatggccccttatctctgacagttgctgccgcaatggcccccaaactatctcttgggccttctgcagaaaaggatcgagcacaggagcacaagctccccatcacctgactggtgtgacactttgggtatgtgtgtgcacacactggaatagtaagctctgtgcagatggactatgttcacttttgtcattcacagcactgggcaccaggtctcatgctctggggacactctatgctcagagtttttttttttcctccgttttttaaaatgaacaacaaaaaaaagttcaaagcaccttgcacaatgcctaacacctggcaggtactcaataaatagcagctattattagcgtcatcatcacacgtgccactgctcttcatcccaacaaaaaccttattttgccaacaaggaaactcgaggcttaaaaggagtgatgtgactcaaagccgggtgtgtctgactccacagtctgtggtctcccctcctttgtgtctgggggcaggggccatcagagtgtatgctggaggtgaaggaggggaagggcagcagtgtgcgtcagggggtgagcagatctgacaatgggagtaaggaggagttgattggagtgaggggagggtcgtgagggagatgagggtgcaggatgggagcatacaggcccaggatgatgatggttttggagtctggctgctctgaggctcaggtaggaggtggactcacttgccaatgtacccctccagcactggtaagtgctcaccctgaaggtgagctctgccacccttgtctgacacagcagacgtctacctccaccattatattgggcaagcaggtgatatattgggcaagtaggtgatatattgggcaagtaggtgacaggggatccggcttcagttcatttgacaaaacattcaatgagcacttatcgtgttctgggcactgtgctacacactagggatacaactatgaacaacacaaagtccctgccatcgtggaatccaccttctagtggaggaagagatatgatacacaagaaaatatatttaagacctaagaaggaaaataaagcagggagaaagtggcttacaagatgctgctattggccaggcacagtggctcatgcctgtaatcccagcactttgggaggccgtggcgggcagatcacctgaagtcaggagttcgagaccagcctggccaacatcatgaaaccccgtctctacaaaaatacaaaaattaggtaggcatggtggcgtgcgcctgtagtcccagctactcaagaggctgaggcacaagaatcgcttgaacctcagaggcagaggttgcagtgggctgagattgcaccactgcactccagcctgggcaacagagcaacactctgtccccccaaactccaaaaaaaaaaaaaagctgctattttaaacataaaggaaaagcctatcagagaaggtagattttgacagctttcctggcaaaggaaacagcaagtgcaaaggccctgggtcaggaacaaggtttaaggaacagcaagaaggccagaatggcttgagcttccagagccaggagggagggagtaaaagttgaatagacagacaggcgctagctcatacagggtttgcaagccaagaaagatgttctaagtgtgatgggagaaatgacaggctctctctgtggcaggtgagggttggtctcaccctcacaaaaccaggctccagcctcacccattgcccatattgcctatggggccttctgacccattcattctccaagaacaagcccaagaagccctcagtaagccctcggagtcccttgacagggctttgtcagggtcaacctccccagactgaggactactctagaacatggaaagatctgcctcatctgggtgactgggcatgcagctcaggcctggccacaggaggctcagaaatcaatagaacgtcagtagaaagtaagggtgactatagctcctgacctccattccctagcaaatctccatttgggggcaagtcgtagcagtggccaagatatggggctgggagcaaggggaaggtagttctgtaccacctccctcaccagaccttggccagggttcccagactggacaggtagagcagaagtccttgtgactggtggcctgctcactggatcccttcctccaggggctacccatcctgtcctgtccccacacgaggctcagagagatcagacttggtacctggctcacatgctctgtctagtccctctcaaaactgttttgtggttatgtggtgcgccctgaataaatcccaagcctcacagtgcttcccagtcatgtaaagtctcctctcagtcctcctgaaggtcccgtgaccctgggcctcacatgattgctgggaacagtctaggcttgttcacatgtccatgcccttgcccaggcaagcatctccatttagacagtcttctgccttcttctctgcaccttatcaccctctccatgtctcctccttggtgaatcttcctgggctccccactcagcactgccccagaatgctttgtgcacctcatccagagcccagaatctgggccccaggtgaaaggatcccatttcccacctagggacatgccagaggagttttctagagggaaaagtgcggcatagtggggtaagggtaggggcatctgagtgctgcattatttatgcctgtgtgggctctgtgagtttcaggagggatatgtgtacacatttagaatctgtgtgttgtgcctgatgtcaagcttaaatgtcacttcctcagagatgttacacctagcctaccaatctaaaccaggttcttccgtgatgccctcctgtagcccctttttcctctccttaccaggtgtatttataactaactatacactgaggtctgatcagtgccagtcctgttggcttggagctcttagagagcaaggcccaggtctgtctcgtaaaccactgtttcctcagcttctaagacagggcctgactcctatagaggctcagtacctatgtgatgagttaattaattctatacacattttcacacttgaacatctacctattttgttttgctttagggggatgaggctagcctggggggtgtttgtgtgctataactcagggcatggccctttcggtcaccacgtgtggcctccctgtgggatttctgaatgtggcctgtgtgcacccacaggcatataggctgggatgctgccatgttttagtatttctattcgtacattttctattgaaaaacaaatctccacacgaggagcaccctggtgttttggtgtctgtcttgccctgagaggtctcagcacctatgtgcctgcacagacatctgggttttcatacctgtgtctgagtatgtgtttacccctgtttccaaacctggtgtgtccattttggcatctctgtggacaaatatacaaacgtctatgtgcatctgcagggtttagcatctatgaattttcttagggaatctctgaccaaaagtatgggtatctggctcccaggacccaagggtgcacatggctaccatgtgtttcagaatctgtgtatgtctcttgcaggatcattgcatgtgtctgcatgcttatgtatttcagtatttgccttgtgcatccgttcaagacttacgtggcctctctagtttggcgaatgagtgcgcgcacacgtgtgtgtgtgcgtgtgtgtgtgtgtcggggtgatataaacacatgtgcgtgtgtacctgtgtgtctttcttcccctcgctgctgcgccttcccagtctggatgagtaccttttctctgtctctctctctctcacacacacacccttgctcatatgtgccttgcagatggggagggggccggggtgtcagcgagctcctgtgtcacaaggttaatttctccacagccaggcaggctgggccctgaggggagtggtgggggaggggctggtccccacagcccctctgataaatatgtatttggggctgctgtgctcaaaggtcatggggggaaaaggaggaggaggggtggtctgcactgtgctgtgctgctgggtcccagccaggctcagcatgggttgtgtgacccccctccagaggtctgatgagattcagggagatgcccccctcatcctggtctggcccactccacccacatccatgctccgagggagatgctgctgtggacacacagatattcaaactctgaaacaggcaatcacacaagcccacacccgccgacacctagacagaggctcaaacagatgcacaaagacggcctcatgggccaccagatacatggaaggctcagagtgcagagccagacccatcgcttcttccccaccccaaccttcaacccaacgccaaaaaaaaaaaaaaaatgctcaagagtgcatagtgtctcacagtaagaaagctttctacacattcaatagacgcaaacacacacacggacccaaaaatgcagagtccaacaagaaaggtccctgaacactttgtgggtgggcatgtacacatagacgcacaagcaaacacatacacaaaggcacatacatagatgcacaccaggagtcccaaagatacaaagttctacgaaggtaggcacatgctgacaactgcagataaatgtatgaacacacatgcacacaaacatgcacacatacaaagaccccaagacacacacggcaggcaggatgcatggtggatccaggctgggaaacccaccctgctgcaacagagccggatctggccctttccccgctgaggcgagaatggctgcctggtctctggtcatgggcccccagccagcttcagccaaatgcgccatcatttgtccagctctgagtcacatcagttgtcgagcctcccctcctcgctgaccagccatctcggccatcagcggcctcggccattagtcggctcctgcctctggcctgcatttgttgaatctcccttacctggcagaaccgtccggaccaatggaacccttttggagtcggcctgaccttttcctcaagggattccgatgtaccctgttgtatgaccctcggcccatgcctcagggcgaccctcccctcagcacactgctcaggctgtcattcttcaatgaccgctggccacagtagttctggtggattgtgaggctgtgtgtttgagtatgtgtggaagtccgcttgtaggtatatgtgtatgggtggtgggatggctatagctgtgctttaagtcaaaatgagtgtgtgtgtgtatgcgtgtgtgtctgtgtctgtgtgtgaataaggggataggaagtcagcagctgtgcttaaagtcagagtgcctgagtatatggttgtatatatggggagatggaatgtcaggggctgcgcttcgtgtgtgtgtgtgtgtgtgtgtgtgtgtgtgtgtgtgtgcactttaatgcaggagtgacttggtgtattggcctgggcttggcgtggggggccatgaggggccgtgtctgttttgggcatggggggcagtgcggtacaggcatctgtttctcaagcagttgtgagcaagtggaatgtgcctctctcagactccgttgcttgtgtttgtgaaagtgacagatgctgcctccctggcctcactgcggcggattaagtctgtgaatgccacatgagtctgcaccccgggtgggggagggtccccagtctgctcttatacttgcgtgtgtgggccacagccctatactttataggatcctgagagtgtggactaaagtaacccccaaccttgttggtttctgtgagggagaccctgaatggatgccagaataaaggtccctgtgtgtgtgtgcacaagcacactcatgctcatagacaagtccgtattgtccaaagtacgttgtcacgagatgcatgtgtatatgtgtatgtgtgtgtgattgcaggcataatagctccccgctgccagccagatcaagttccaacttctcagagcagcagctgagcctccacagacagggccttgcaacattgtgccaacctctactcttagactacacctccaacctgggctgctttctcctcactttcctctgccatctttatgccctgccaccagtctgcttttctcagtatctgagcatccttaaagactcacctccctgtctaaacccacaccatcttcattccccagattcctaatgacctggaaactccctttgtgctcacagtccaggcgcccagaatcctgtctaaggctgggattggttctgcttcagagtctaggcctttgttggcccatggtcagtgcctagcgatcattttcaggttaaggagtgatcataccaccattgcccgattacctcagggaactcactggactttatttgttcagtgattcacaccactcaataaatacctattgaatgcagggaccttgcatgtggagccaccaccttcagcctccttccgaatgcgtcagagctgggaaagctgcctgtcccgaggatctaatgaagttggggtggtgatcgagtgagggaaaatgcacctgcctcccaaggccaccatgtggatctgaaaaggtgacacagggctcaccaaaaggggtaggggggaccataagctcatgcaaacccctgtgtttgaacaggcccagccccaaaccatcactgatggaacgagctcaaccatgctcatttgctggctctcccttcaggatataaagcgagacccacatccttagagccctcactgaaccacataaggcatccatccacccgacaggtcctgggagacaggtctgtggatggacatctcagggggcagggaggaagtgggggaagagacagagccagtgaaaggaaatggcgctgggacagctaatgggataggacagacctataaggacagacaaggctcggtatgaggaggaccttggttctagcgccagcatggttgctgacaggctgagcaaatgatgtgggcctcagaattctcatctgtgagagggacaccactggggctgctgtgagagcgaggtgggtgtaagggacatcatggtcattattattattagatcaagaggtgttgagcccaagggaaaaatgatgagtgaaatatatttagaaggaggaatagacatccatctgaggaggccttacacccactctgtcttctaacaactcttcacacttgggtttctcaaccatctccatcctgaaatatcttggaaattaaccagcacatgccagagatggaaacttctcccttgccatcatcgatgtccaagtagcccctggtgtggccatctgtccctgctcccctcgttgcaagtcatgcctctacacattatgattatgcaccagggctatgaaaagctctacccagtggggtgctaaggttggggcccttgctttgctgtcacattggtggaggaagaagttctggcttataggccctgcatacaagaagggagtgtatatgaaccagaatggaggtggcctggagtggccactgacggacttgctagaaaaaaaaaaaaaaaacacctggccagcatgctgtctaggacgtataggctaacaacctctacacacacagcatgggtataggtgtgtgcatacacacacactgtggctgagttctttccctactacagccctgacacagacaccttccattttccctgcaaagactagcagagggaagtgagcgcaaccaagacccccaaagatgacactgcaacctgccacagagttcaccagcacatgccagcacagcctcagggaaatgggggtctggacctctccaacggcaaggatgggcctctgtccagcattacccataaatcaggaagtagatgtggaatcgcattatcagcaactggagatgctgcctatggccctgatcggctttactcctggcctgcctgtcaccccctgacatgggacgctttgttactacagaaggtccagggaagcttttcatgggctgatagactgtggggagaggggatcttttcttgttttgttttcttgaacccagcttcaaggctgctgtgcaagcatgccgtcaaactcagccatacgcccgcgacctctgtgcactcacacatctctcatcactctacccagaccctgcttcacaaacccaccctccctcttacccaggacacgcagagaccccgagcaataacaataataatatctccatgcagaaatggtactttcacatatgtgactttttttgatgtgcacccttgtgtgcacacactatgttcagacctagtacccatacacagagccttcactccaaacacgctgcacatacaaagtgtcacgtgtccactgctgaagccagactcggcacatgggcctgcacacgcgtggacggcttccacgcacagagccaaagagggcctcctgaatgcacacatagcgagtgatacataaacatcaggacgagggagagatcagtacaaatatgcactgactcccttctgcacatatgtcacccatgatggggacccccagtacccaaccccccactgaaaacacatgtcacgattctacacctttggctcctcactctgccaaggcttcgaggcccagcacacacagttagtccttcctgaacacatctcaccacacatgcaggccttatacacatgcatgctgccgtcatggtctgactctgtacccaccagccccccactgcacactgactctgtacccaccagccccccactgcacactgactctgtaccttccccttatatcctggggggtggaaggacaaatccacctgacaagatggcaagagactaaaagctactgagcgaagcggctgattgggtctttctctaaatccaggacctactccccaactccacaggccccaggaaggaggcagaaagtggggagtggtcatcaggccaaaggctttctctcaggatcttttacctggactcaaaagctctaaggactctctcagatggacttccgccccaatttcctcccgttttcacttcccgctaggcatccatgtcattttcttctctgtccacacccttctcagtggggctgagtcgacagccatgagccctcacttaagatcttcccctccccctcccagagccccagtgagcatccagcaggacttctccaggaggccacaaggaagtagggggtggcactagaacccaggggacagacccaaacccccactcagggtaaaaaagagggtagaaatacatggggtttcagaacaggggttaggctctggtaggaagttggggattcctgcctttgcatggagcccctttccctggcaccctgttgaaggccagagcagcaagagtgatgaataaatgaaactgagggagggggtagaaagagctggcaacaggggaaatgagtggcaggaagggaagaataaaagaaagggggaaagggggaagggaaaaacggagaaaaaagaagggaaggaggtggagataagggaggtagaaaaagaaaaactaaggggtggggaggaggagaaagagcttttattgagaaaaggaagagatagaaactgaaaaacagtgagaaagaaaaaacagtaaaggagatggaaataaaggagctgagaaaggacatgaaaagggaaagaaaagagaccaaagaggcagcaggcagtcgaaggggttccccaagttacagactttgtccagagagctgaggggtgcaccgcggctccccaacctcactctggggccctggagctccgttttccacctctcctcctgcctgagatgccaccgcctctgagtgccccatcccggctgctttttcctatttctcaccgtttctgctctccaaggcaccccgttcctttctctcacccctcattcccaccacccagccctttctcgttccctgtgccctcttacctctccccccccattgcaccctgcttgcttcggagcttcagacagcatcaccgaccaatatcctcaccatcatcgtactaaaccggcccccacacctccaggaaaagagagagagagagaaaaaaaaaaaaacaggcggaaccgccaccagccctgaccccctctcgcctcattttctccacagtcgccccttcctcaaatgcagggtcaaaatgggggtcccgcccagcccggggagcctctccgaagcgccgcagccagccgggagcagatgccacctcgcctctcttctctgtcctcgctcctttttgtgttcagtggccctggttgcgatgtgttttattttcatcgtctttttattggtattgttttttttctctttttcttttctttattttttggcccgggggcagcagcggcgaagcgcccactgcctgcctctttcctcagctctgcggccgtcaggctctttctctagtctgcgctcttgactccctcctttctcttctgcctcggctctcgctcctccgctcctccgctcctccgtcctttcagctccgtcctcagccgactgccctctcctctctctactgcttccccctccacgcctctcctttcctcatccttcttgccccttctccctttttcctctccctcttcacctcctctccgtccccatttctttccatccctgccccccgcccccacgtacacctctcctttggttccctcactgccatcgagagcaagctgaccccccccatccccaaataataaaaatacccagccagggggcaaagccccggcgccgggcgccgagagggaggcgagagggccggggccgcggcggcggctgacagccggagcgcggtgcggagtgagcggcgcccgcccggctcccgcccggctcccgcccggagagctctctgcaataggccgagccggctgcattaagcttcttgcaatcaataaagcgcgggtcagattatgcaaagcgcagatattaatatgcaaagttttaaagatttttaaatggaagggcaagcgcggcgcgggcgggcgggcgggcaggggctgcgaggggagagggaggaagggagggcaggcgggcgggcgcgcaggcgagctggggagaggaggaggctgcccgccgcccgcccgcccggctgcgccgcgccgccttgccttaccgctgctcccatcggtaggcgccgctgtcttcgccatgcgcgtcagctgcacggctccgaggggatggccgaggaggagccgccgccgccaacgctacccccgctcccgctcccgctcccgcgcccgctcgctgcctgctgctggcgctgctctggccgctgctcctcgcctgagctgccggcgcgagcccaggcgcgcgccatccccggctcccaccttgtccccatggcaaccccgggcccaaggatgctcagagagagagcgcgagcgagagagcgaggggggagagagggagagggagagggcggggagcgcaggggacacggaggcagggagaggcccgagacccacagagacacagagagacacagagacggagagatgcagacatatgcagaaacagagacacagagatagaggagaggggtaggaatagaaggggacacggagacaaggacaatccttgagaccgacagaggcccacagagatactgagagacacagagacacacggacacacagagacacagagacacacggacacacagtaagagacagaggggtaagggcgaggggcagggagcagagagggattcaaaggtatggagagacactgaggtccagagactaacagagatactcagagacacagagacacccagagatagagacagagaaaaaagagagaggggacaggacagggagcacagaagatgcagaggcagagaaagactcctagaggcagagagatgctcagagacacagagacacacagaaacaaatagacacggggacacacagaaaagagacagagaagggtggggagcacaggggactcaaaggcagggagaggccctaaaagccagagactcaaagagacacccagagacaaagaggaaaaggagaagggagagggcaggaagtataggggacatggaggcagagagatgtccagagacacacagaaatatagagacacaggaacagagtggggggagaggagggaggagggagcagatggggacataaaggggcaccaagaaccacagagacactcagagacaaagagataaggagaagaggtccatgcagagacagagatgcagagtcagaaagatagccacagagaagtagacacacagagacagagagatagtgaaaaaatatatatggggagagaaagagactaattcacaaagacagagacacagaaataagagagatagatatgcacaaatcagagataggagaaagctacacgcaaagagagacaaatgaagatgtaaggcagtgttgcagagatacagagataggaagacatagagacagaggcagacacacacagaggtaagagatatagacctgcggaaacagacagagattaagaaagagccgttgaaagagccgttgaaagagacagagaaacagagatggagagatgcaaagccagaaagacagacattgacagagaccaaaagatacagagactgagactgagacagagaaaaaggcacagagagagtcaaacaaggagacagagtcaaacaagaaggtgtagacagaaacacagagaaatatacatagggattctgagagagaacctaagaaacagagacagaaagaaatgtgcaaagagagaaacagagatcaagacataaaaagagatgaaaagaaatacagagatggtgagagaaagaaagcaaagacagagacccagagagtcaaagtgaggcagagaaatgcagagacatggacagagactgcaagaaagtgacaggaacagagaaacctcaggagacacacagagagacacagtgagatggagaaaggcactggaagaggctttcagttggacagagatccacagagagatgcgagacagagacaagaagagacaaatggagagtcagaaatagagaatgaggtctggtagacaaggctggggatggggggcagagacagagcccaggtaaaggaggaagggacaggctggggtgaaagcagaaagtaggaaggtgacaagagggtccagggaagcaccaagggggaaagggcagacaggaggggagggaagaacagcagaaaggagaggagtggggaagggagaggaggggaagaaagagaggagggcagtgcccagtcaccaagcacctcccctgtgccaggcacattatggcttggagacagggaggaaggaaaggaaggccaagggtgaaggggctccgaccaggggaaggtgggcacagggtcttgggagggtgcatggctcccgccccctgcaggcgggggtgcagtggtgcaaagaggaggatagggttgcaagtggtacccagacctgggagggggtgtgagagggagggaacaggagggggaaggcagggagggaaagggaggaggaggaggaggacgcaggcacgcgctgcgcggtcttggcttagcagctgcaaccgcccttcgctttgttaccagcaaggctaccccatgcatactgagtggacacgcgggaccctcatgtgtgtgtgagaaacacgagaatcaccaactgcccacgtgtatggagaacgctcccaagacctacactggaagtgcgtaacataaataaatataggaaacacctaccccgtgggcgtacaaagtaagtacccaggacctgtgcagcgtgtgcataatagacacagaactacctactactccctgtacggagcagcctcctgggacccgcactgtgtgcgcaacacaaataaatgcaaggaatactaccctctgtccatacaaagtaggtatttgggtcttatgcagcagatgcataatggacatgggaccacttaatacccccatacagagcagactcctgggatccacacagtgtgttcacaacacaaataaatacaggaaacgcccactccaactgcacacaaactaggcacatgggcctacagggcatgaacatagtggacacggaaccaccccatagccacctaccaaccagcctccctgggacccatactgtgtgggcacaacataaatgaatgcaggaagtaccctatcccccatgcctacaaagctggcacaccaacctaatagacttagctagtgtgaacataagagacacccatgagcaggttctggtgatccacaaaggcacataacaaaactgaacataagaaacacccactccgcttgcatacaaaggcacatggggtcccaatagtgaggagagaactcaaaaaagggtgtatataatgacaacccacacactatccattctggaaggagcaacaaggaatactggaccctgcaatgaatctacccagcagactcccaggtccctccatctgtacgtgtacaatagacctaggaggagctatggacagcctgagtacctactagaagggaagcagggacagggcagagaccaaggatgtcctgttccctgccttggccctggcacctacaaggaccagtacatgggtggggtggggggcggtcatccttcctaagaatgaccaagtacataataattgtgtatacagtgagtatacactaagcacacagcaccaatgtttgtctgtttgtttgtttgtttgttttgagacagggtctccctctgtcacccaggctggagtgccgcagcgtgatcatggctcactgtagcctcaaactcctgggctcaagcaatcccctcttgcctcagcctcccaagtagctgggactacaggcatgcaccaccacacccatctattttttttttttttaagcagagatgaggtctccatatgttccccaggctaaagcaccaattttaaggatccaaaaaacttggtttgatatgtgctaagtccatatcatatgcttacttgccagtatgttaagagtctgtggtccacaacctatgcatgattggtatcttaattatccagaatatccatattaagcagaagctgacatccctcatggacttacaaaagtcagatccaataggagacttaagcaatccgcacatgcaggttgtcctaactgatttctagggctccgcccagccccgagtcatgattccacgaaggctgatgcagcacatgtatacacaccaggcacatgcaaagacgtacaccatacactgtacacaacacagcaaaaacatgtgtgctctctctgcttctgaaatagcataattccagaagtaccagattcctctgaggaatgtgtgtgtgtgcatgtctgagtgagggccatctctgggtacaggtgtgcatgtacatggctcttcctgtacgaatgagctcagctcttattccctcctcattctgcctgttcatctttcagaaacatgtatacaaataatagtacctgatgtatactaagtacaaaacattgcaagctatggatgaccttaattgagtgtgtgcgtctgaacatacatttatttatttatttatttatttatttatttagagacagagccttgctttgtcactcaggctggactgcagtggcacaatctcggctctctgcaacctctgcctcccgggttcaagctattctcctgcctcagcctcccgagtagctgggattacaggcgcatgccaccatgcccagctaatttttgtattttttagtagagacggggtttcaccatgttggtcaagctggactcaaactcctgacctggtggtccacccacctcggcctcccaaagtgctgggattacaggcgtgagccaacactcccggccttgaacatacctttagatagatgcatttgttcattaatgaaacatttgttcgcgcatctgtggccatgtgtgtgcgtgtgtgtacatcttggtgtcttggttacaagtcttggggctcccttataatctctgaggataaagggtgtaagataagggaaacgaaggcacacaaagcaggaagggaagaaactggggagaaggaaaaaagtggtgcaaggacaaggagcaaaaagaagagacctgttattcaggaggctgaggcacaagaatcacttgaactcaggaggcagaggttgcagtaagccaagattgttccactgcactgccctgggcgatagagcaagactctgtctcaaaagagagagagagagagagagagagagagagagagagagacctggaactggaactggatgtatggaaggaagggaggaggccctgaggacacaggcagagggagatgtggtgcgggagcaaggaagagaacaaggacaggaggagaatgggtgtgagagaaaagaggaagctaggaggaggaagggaggtgaatggtgagcagagcagagtgagggtatcaggaagagtgaaggggactggggagaggagaaaggagatgggagaaggagataaagaccgaagggaaagaaataagaaacagacagaggcttttctggtctgaatgaaatttagaggttgccccagtggcctcctatgggaaggtgttcgagtcggaggatgaaggtgaagcaaaagagagaaaggaagaggaatcacaacctagctccctaggatggggcagccagctgtctccatcatcctagaaggggcccagagacagggacccggaggcacagacagagaggtatgcagagctggactgagatgtggagtcatctgaagtgggtagggtcctgggacaggcaggaggaggagtggagagacttgcaggctcagggaggccagggctcagtggtgtggagacttccaaagaccaggaggaggctggagcaggcaatggagcagggccctgagaccacaagcggggaatcgaagaccaggtaaagggaagcaggttagagaagggcagagaagtgagggcctgctgagcagaaccagccaaagtaaatggaggagcagctggagtgggatgaaaaggccatgaggcatcttgcagatgggtcctgccttatgcacacccgggttcagaagctctcccaggctgactctccccaagcattcagtttggttccatttaagacatgcatactgaatactatcacgaattagcactatgctgtaagctgaagaaacaaatgcaaatgagacacaactctgccctcatagagaccctcatctgaagttgttggtgggggagggaatgaacaataaatacacagttactgatacacacagcaacacagaagtacctcaaaaccaaagtgagagatgcagaagaccacacactgtaggattccatttacatgaaattctagacagcaaaactactgtgacggaaaagcaaatgagtggttgaaaagggctgcagtggaaggaggggactgacagcaaaggcgccggagggaactttttagggtaatggaaatgttttgtaacatgattgtggtggtggttacacaactgtgtgtgtgtgtaaactcattaaactgtacatttacaactggtgaattttattgcatgcaaattatatcacaataaagctgattgcaaataaataaataaataattaccagccagaatattcaagactcaagatagggctctatgggagccaagaggaggtggatggggcagtgacggaaggcttctgagaagaggtgatgcctgagataagacctgaaggataaacaggaggcaggatggagaaagcgttcccatggaagaagagctttcacatggaagcaggtgagaactgaaaaaagttcactatgttttgaacacagaatggagagtaagactatcaagaagtgagtgcaaagaaaatcagggttcaaaatacaaatccattgctattcgaagtaccatgttgaataaaacccacctgcacctgaaaaggcccagagagaaggaaactatgagacacgactggggattttttttttttttttttttttgagacagggtctctctcctccctctgtcatccaggctggagtgcagtggcacaatcacaactcactgccacctcgaccttctcctgcctcaacctcctgagtagctgggacgacaggcgtgcaccaccacaacctgctaatttttgtattttgtggtagagacaggtttttgccatgttgcacagcctggtcttgaactcctcggcttaagcgatctactggccttgatctcccaaagtgccaagattacaggcatgagccaccgctctgggccaagactggggatttctaattggcctcctgtctgccccacagaaaggtctccttcctgccgcccttcccagaacttcctccctgctcttttcacatggggatgtctctctccattaggaagcagcctctgctctggacctatcccccaaccctgcccacatctccaagagtttgtgggccccagtgaatccctccaacctggattccatgtggccactgccccctggtggctgaagtgatgcatgactaaggacgaagggacacctccaagtccaggcccagcatgcccttccagaggccagtccaaggcactcccactactgccccccaagacacacccttgtccctgacagtctcctccttgctaaatcctacaagcacttttcagtcctatctgactctcctctgcagcatgcagccacaaatatcttttcaaaatcctcttggcatctaagaaacctcactctcttggttctccagctctgtctgggctgctctcccagggtgaatcatcccctcccacaactgctttctctatgctggtaatccctaaatttgtctccagtttagccctctctcctaagcttcacatcaggatacccagccacctcctagaggttccaaaaatacctcaaaatcaacatgtctaatctaatcatgtcatcttctctaccatgcccctagaccttggttcccactccccatggtgatactccatccaatctagcattcaagtcagaaaaattgtccctgtccttgacaccttcctcttcctcatattcacatccaatcaggattgaaatcccatccagttcatttacttcattaatattaaaattttaaaccatatgaaattgacaatatcacccagctttttcttacaaaatgggaatttcatagagttcaaccgagtatttctcaaatccatctcctcctctcttccctgctcccagtgtcctagttcaggcctccacatctcctgcttggcccatgaatctccttactacctggcctcccagtctcccctcttgccccctttctagtctatcctccacactggctactggggtaatgtttctacaatatggctctgatcaaatcactcccctgcttcaaactcttacttcctgttgcacacaggacaaaagccaaactccttagtcagcttttcagacccttcacagtaactggctcccctccctctacagggagcaccactatgcatcctgtactgcaaccacaccaaaccaccaccacttccttgaatctgcccttaacctcttggcctttgtacttgcagttccctataactggaatgcccttctcactcttgtccccctggctaacttctatttgactccaagaaccaacttaaaatcatatgttaatgtaaacctccagttcatccattcatccatccaatacacacagcttgagtatctatacttgtatgacctccatagaaggtaccggggacacaaaggggaataggacacaattcctgccatcaagaaagctcacggtccagtaagagacacaaatgcatatataaatcacaacactatagtgtgctaggacacaaaactagactgggaaaattgaattttacttatttttgagatgccgtttcactctgttgcccaggttggagtgcagtggcactattatggctcactgcacactcgaactcctgggctcatgttatcctcctgcctcggccgccccagtagctgggactataggtgcgcacaactacacccggcattttcttgaattttaaaggggactgggacgccgaggcgggtggatcatgaggtcaggagattgagaccatcctggctaacacagtgaaaccccatctctactgaaaatacaaaaaaaaaaattagccgggtgtggtggcgggcgtctgtagtcccagctacttgggaggctgaagcaggagaatggtgtgaacccgggaggcagagcttgcagtgagccgagattgcgccacggcactccagccaggctaccctggctggacagagcgagactccatctcaaacaaaaacaaaaacaaaaaaagaattttaaaggggaaatagtccttctgaaggagtcattaaaattggagggaagcatgaacaagagcacacaggtgaggaagagtaggttgtgtgcagggaggcagttgggattgctaaagcataaaccataagagaaaaatgctgctggagaggctagatggggcccaatcattaagtatcttttgatctaggaggccatggggagccgctgatgggttttcatcaagagcagctttgcatttttgagaatatgaatctgagaggacaagaatgaaagcaggaaaaaccaggaagctattgcaatagcctaggcaagagatgctaatggccagtattgacattggtatcagggacatgaaggaggcaacaggtttaaaaaacccggaggtaactcaagtcagcagggctttatgtttggatatgagcgtcagggagagggtggtgccaaggatgatgcccacgtttctcacttggatgcccggatggatggaggtgacattcattgagacaggagaaaataggaggaggcacagaacttattcgacaaagttctttcttgaacctcttatatctgaggtgcctatgagacatgtcctggatccagcaaagagttatattagttcttcagtctatattgggatacagttgtgtgcagtgtcatagagagaggtctctgggctgaagatctggacatcattagcatagagttgatagctgaaatcacgagtcgatgatgtccctcaagaagaatacgccgaatgtgaagagctctaagcccagaaaagagcccaggagaagtgccacatttcaaaggtgggcagaggtcaggtgcagtggttcacgcctgtaatcccagcattttgggaggccgaggcgggcggatcacctgaggtcaggagttcaacaccagcctggccaacatggcgaaaccccgtctctactaaaaatacaaaaaattagtcgggcgtggtggagggtgcctgtaatcccagttactcaggaggctgaagccgaaacaggagaatcacttgaacccaggaggtggaggctacagtgagctgagattgtgcactccagcctaggtgagactctgtctcaaaaaaaaaaaaaaaaaaaaacaggccaggtgaggtggctcaagcttgtaatcctagcacttcgggaggccaaggcaggcagatcacctgagatcaggagtttgagatcagcctggcaaacatggtgaaaccccatctctactaaaactacaaaaattagctgggcatggtggtgggcgcctgtaatccaagctacttgggaggctgaggtagggagaatagcttgaacccagaggtggaggttgcagtgagccgagatcatgccactgcattccggtctgaccgacagagcgagactccatcacaaaaaaaaaaaaaaaaaaacaggtgggcagagaaatgaagtccctaaatggaccacagaagaagctgtcagggagaagagaagagaaccatgagcctgcttcattatggaggctgtggtaggccacccctaagaggtcccagtgacccctgcctcctgatactcatgtcctcgtgtggtgccctctgcttgaacgtgggctgaaccttttgacttttttaaatcattctatatttcatttcaaaagtgactcacttctcatgaatagaatgtggcaaaagtgatgggatattacttctgagattaggttataaaagactatggcctggtgcagtggctcatgcctataatcccggcactttcggagaccaaggcaggcagatcgcttgagctcaggagttcgagaccagcctgggcaacatagtgaaaccccgtctctaccaaaaatacaaaaaattagccaggcgtggtggtgcgtgcctgtggtcccagatactcaggaggctgaggtgggaggatcacctaagtctgggaggcagaggttgcagtgagctgaaacggtgccactgcactgcaacctgggtgacagagtgagaccttgtctccaaaaaaaaaaaaagaaaaaaagggccgggtgcagaggctcacgcctgtaatcccaacactttgggaggccgaggtgggtggatcacctgaggtcaggagtttgagaccagtatggccaacatggtgaaatcccatctctactaaaaatacaaaaattagccgggcgtggtggcagatgcctgtaatcccagctactcgggaggctgaggcaggagaattgcttgaacccaggaggcggaggttgcagtgagccgagattgcgccattgcactccagcctgggggacgagagagagttcatctcaaaaaaaaaaaaaaaaagaaagaaagtgaaagaaagacagagagagggagggaggaagggaagaaggaaagaagggagggaaggaggaaggaaggaagggagggagggagggaaggaaagggagagggaaagaaagagaaagaaagaaaaagagagaggaagaaaaaagaaagaaagggaaagagagagaaagaaagaaagaaagggagagaggaaggaagggaggaagagaagagaggaaggaaggaaggaaggaaggaaggaaggaaggaaggaaggaagggagttttgggttgatttaatatacagaagccaaggaaggaaagatttctaaaagagaggtactggtcgatggagttaaagctttagataaagatgaaaaatgtacttggatttggcaagagaaagtccttaacaagctcaatgtgagtggtttcagtgagttgtgactcaaatgcaaggtgaaggccggggctggtaagcaggaatggataccaatgtttctgcccacccagcatccatttcgccatcctctgtaatggctccctgacttttcactgagtaaccattacccacgtcctactggatatgcttccatgagactgttagggcactcagctgtccacaggccaaggggagtcatgggaggccacaagactcaagctgcaccagtcagaagctctccctggaatttgaatcatgagcttatgtgacaggaggcccaaatctgattgcagctgatttatgttgtacccagggccctgaggaagctgccattccttcctgctacttcaatccctgctactgccctggttctagtcttttctgaaggctgcttcttcagtctctccctctgttgtgagtgccatcttaatctccttctaataaatatctttcttgcttaagttagcaagagtcggtctctgttgctgcagccaaagaaccctaactcatacttgtcctttcaagaatttgggatgagatgaggaggacaatgaaggacaagcacgaggggagcatagcctggaggaaggtagaggtttttttgagtgcggcggggggagtttgttttgtttctttgtttttgagatactctgtcacctaggctggagtgcagtggtgggatcatggtagcctcaatctcccaggctccagcaatcctcctccctcagccccctgagtagctgggaccacaacaagtgcacaccaccatacttggctaatttttttttatttttagcagagacagggtctcactatgttgcccattctggtcttgaactcttggttcaagcaatcctcccgcctcagcctcccaaagtgctgggattacaggcgtaagccgctgcacctggtgagtttttttcttttagttagtttctaaggtggtagaaacatggatgtatctataggttaagaaggaagacagagaagagggaaggtgtggaaacagggaagggaagaaagatggagtaagagtcatgctgggagtcatgctgggatgagcaatacacaggtggagaggaggacaagaacagagcttgaagaagtgaaataaatatgggtgtggctacatgaagggttgtttcatttgtttaaaaaaatctttatatatatatgtgtgtatatatatgtataaaaacctatatatatatatatgtttgataacaagttgaaggaaatcatggtccatttgcctcaattttatttgttgagactgaaagggtagggttgtagggatgctcaagggagaagggtaagtgagagagggggctggctaagaagtttgagtgacacctatatgtgctactctgccaccatttttccctgagccaagttctaccacctggaccacagttagggatatgctggcaaatgaggcagaaggctgggggtataaggggctgggcacgatggctcacacctgtaatcccagcactctgtgaggccgaggcaggctgatcacttgaggtcaggaattcgagaccagcctggccaagatggtgaaagcctgtctctattaaaaatacaaaaattataaagattattagtatgaatgctgttactgagataaatgagcctatggatgagataatatttcatgcggtatatgtatcaggatagtcggagtaacgtcgaggcatacctggtaggccaaggaagttctgtgggataaaggttaaattaacacctatagatgtaacggtaaagtggattttagcataggtctggttaagtgtgtaacctgaaaaaatggggaatcagtggacacctgtgatcccagctacttgggaggctgaggcacaagaatcacgtgaacccaagaggtggaggttgtggtgagctgagatcgcgccattgcactccacactccaacctgggtgacagagcgagactcagtttcaaaaaaaaaaaaaaaaaaggctagggttgtaggattgtaagggaattgagagcatatgctggtcattttccatttgccctccaggtccaccctccattcttctctacccatatgggtggcatcatcggacccccccttgctctctgacttcaaattaggttcctccctaaaagaagcaccagcagggcatcagagaacagaaaaagaaagcattctggatacttcttctccaactcccagctctgtgtcagcaccttggttctgacagtggctgtgcccctccacaactccagctcctctcaggcatgttccatgactctcacagcactccagtaataccaatcctttcctcactccttcagacctaagggtggtcacagcttcctgctgccttcacctcccttgttggttacctcaaccctgcccacacctctgcaaagagtcccttcattaaattatcttcaaaatcccagctgtggtgccttctgtttcctgctgggaccttgactattagagagctagtgaaagagctcagatggtccaatatgagactctggctgggcaaggaagggagagaagccaggaggggtctggcagactggcagaaaacagagggatcaagggagtagagctctctttgagttgacgccacaggtgtgatggcagtgaggggctgtcagatctgaaaggcaggtgctgggatcagagagcaggatgctggattttgaactgggttgtggttaaaatcagggattttttatttggaactcagaaagtcatgtgttagaattccgactctgccattttactaaatgtgtcacccaggcaagtgactttaccttcctgagtgtatatcctcatctgtaaaatgaggatactaacaccagccttccaggtttgtgtcaggcgtaaacacatgtaaagcatttggcaaagtgcctggcatgtggtataagtgctctgtaaatgttcactatgtatgttacacttcctggtaatgactaaacccaaggtgtggtcatgggagtggatgactaaagtgggatgaaggtcaccagagatgaagtggaaagagactgtgaggctagatcattacgaggatggattatcagggacagttaaatatcccagcaggagagcatgggttggggtggagaggaagtctatgagcaggtgctagtcttcaggaacgaggtgaagtgaccagggagtcaacggatgtcaacagggaagtgggatagagggtggtggaacctgaggacataagcctcaaggaaatctgggtcctcagtccctcttacatccctttgagatgtccccagtgatcatgttccctactaagccagagtttatcaagggtggggttggatctaactcatcttgtagtacctaggacaggtgtttaagctggtaaatgcttgttgaatgacttggtgtttgagggaaacagaaaagtctacctctgcatcgtatttacccttggtaataataattcttcttattttaagtaacctaatgcttcttttaaacctcttattcaatttaaacaaatatttcctgagaccttcatacatgctattccatctacctggaataccctcacccactctatacactcaaagacctcctactcctcattcaagaaagagcagaatttaattattaggaagaagaaaagtaaaccacaatgataaactgctacacatccatcagatcagcaaaattaaagcatctgacaacacatagtattggtgacaatgtgaagcaaagagagctctcattcagtgctggtgggagagtaaactggtactgacacttcagaaaaatagttggagagtgtagtgtgcagaaaaatttcctgcaaaagccaggcgcggtggctcacgcctgtaatcccagcactttgggaggctgaggcgggcggatcacgaagtcaggagatcaagactatcctggctaacacggtgaaatcccgtctctactaaaaatacaaaaaaaaaaaaatagccgggcgtggtggtgggcgactgtagtcccagctactagggaggctgaggcgggagaatggcgggaggcggagcttgcagtgagccaagatcgggccactgcactgcaacctgggcgacagaacgagactccgtctcaaaaaaaaaaaaaaaaaaagaggaaagaaaaatttcctgcgaaagatgtccagactgaagctctggaacctgtgaatgttaccttaaatggcaaaaaggactttgcagatgtaattaaagattgtgaaatgaagagattatcctggattatttgggtgggcccttaaagcaatcacatatacccttctaagagggaggcagaggaagatttgacacagacagaagaggagaaggcaccacagaagcagagattggagtgatgctgccacaagccaagggatggtggtggctaccagaagctgagataggcaaggaacacattctcccctaagcctcaggagggagtgcagtcctgctggcaccttaatttcagtctagtggaactggttttagatttctggcttcctgaactgtgagaaaatacatttatattgtgttaagccagcacgtttatggtaatttgttatagcagttacaagaaacagtatagacagccaaacccatgcatacgcatacctatgtccagcaattctatttccaggtatatccctatagaaacataagcatttgttcaccaaaaaccatgcacaagaatgttcatagcagcattattcataatagcctccaactggaaacaacccaaatgtccatcaaaaggtcagtgcatgaactcattgtgtatattcatacaatggagtaccatgatacgccaataaaaatgagtcaactacagataagcagaatatagaagaatctcacaaacacaacgctgggtaaaggaaaccagacacaacagcaaacatatggtatgattccatttatattatgttcaagaagagataaaattaactctatcactgagtgatgaaaaactagaaaattgaagaaaagcaaggcggtggctcatgcctgtaatcccagcactttaggaggctgaggcggatcgcttgagcccaggagttcaagaccagcctgggcaacatagtgagaccccgtctctacaaaaaaaataataataataagccaggtgtggtggtgcatgcctgtagtcccagctactcaagaggctgaggtggattgcttgagcccaggagtttgaggttacaatgagttgtgatcgtgccactgcactccattctgggtaacagagcaagaccctgttgaaagaagcaaaagaaaaagagaaagaggaagaaagaaatgaaggaagaaagtgagggagagaggaaggaaggaagggaggaagaaagaaaggaagagatcgggtgccgtggctcatgcctgtaatcccagcactttgggaggccgaggctggcggatcacctgagatcaggagttcgagaccagcctggccaacatggtgaaaccccacctctactaaaaatataaaaattagccgagtatggtggcacatgcctgtaatcccaactgccagggaggctgaagcagaaggatctcttgaacctgggaggtggaggttacagtgagccgaaatcacgccactgaagtccagcctgggcaacagagtgagactctgtctcaaaaaaaaaaaaaaaaaaaaaaaaaaaagacaggaaggggagggagggaggaagaaggaagaaaggcagaaagggagaaagggaggaagggagggagggaaggtggaaagaaggaaaaaaggaaggaaggaagaaagggagggagggaaggaggaaggaagggaaggaggaaagaaagtgagggaaggaagggaaggaaatgaaggaggggggagggagggagaaagagagggagggaggaagggagggagagagggagggagggaggaacgaagggagggagggaggaaggaagggagggagggagggaggaaggaagggagggaggaagggaggaaggaagggagggagggagggaggaacgaagagagggaggaacgaagggagggagggagggaaagaagggagggggaatggagggagggatgagagcatgacagaaaggtgggcaggtggctccctgatatcccccagcgtccctgctgttaacgttatttcttggcaagagtaacacaggaaaggagggaggtttcctccttcatttccttcccttccttccctccctctttttcttttttttttttttttttttgagacggagtctcattctgtcgcccaggctggagtgcagtggcgcaatctcggctcacggcaagctccgcctcccgggttcacgccattctcctgcctcagcctccccagtacctggaactacaggcgcccgccaccacaccaggctaattttttgtatttttagtagagaaggggtttcccagtattacctaggatggtcttgatctcctgacttcgtgatccacctgcctcagcctctcaaagtgctaggattacaggcatgagccaccgcgcctggccccctccctccctttcttccctccctcccttcctctttccctccctccctttcttccttccttcgttccttttttccttccttccaccaccttccctccctccctcccttcctccctttctgcctttcttcctccctccctccccttcctgtcttttttttttttctgagacagagtctcattctgttgcccaggctggacttcagtggcgtgatttcggctcactgcaacctccacctcccaggttcaagagatccttctgcttcagcctccctggcagttgggattacaggcatgtgccaccatactcggctaatttttatatttttagtagagacggggtttcaccatgttggccaggctggtctcgaactcctgacctcaggtaatatgaacagttcgtttctgtcctgcacttttcagaatgttatttcacaactaaacgtatctgggcggtggcggtggtgattcgtagcagaaagcacagggagcttcccggtgcccccagcgtcccctgggctccgacccgctgtgtccacatcatcacaggtgccctccagagccagcacccaggccacagtcccctcaaggacctgtgggccatttgctgggcctgtctcacatgatctccttgtgtgtaactgtcgggttccaggcctgtgtccccacctgtgcctgctccccacgcggaaaaacatggggacaatggctgctgaccctcgaatgggtggtggcggcacgttctcacttacctctgactctgtccgtcttactacatcccattcaggcacgtcccgaggccttcgcaagggctgaaaaattccagcaaaggctgtcccctgcccagaataccccgtcactctgttgaactcctcctcagcccgcacaggccaacccaaggttccgctcctccgtggggccacgccggcctcccacatctcccatgggctccgatctcctgtggccccacgccctgtccccacacgatcctgtttctctacccgatgctcccagggttgtcctccgggctcagatctgacccacctccgggccccgagggtcagtccctcaccccccgcgcctcgcccgcactcttgactagctcaagggagctccacggcgcatgcgctcagggaggctctggaggcgcgagcctctgcctcatggttcccgccaagtgcactgcgccagcgcagatcccttcagcctcaaggttggccctcctgacttctggcaagcacgtgctggccagaggcacgtctggggctgaacagggttaagggggaggtgacccagagaatggggtggggccaatgacatggaacggaagcaggggcagagcctgaaatgtgtccagccttgaggtgggacccgtattcaaatgaggccaggagacaagccaggggctaggggctcaagggaatggcaggtcctagaatttagcccagtaattgggagcccaaacacaggtaaccccacctagaggagagcctcagccttaggtcatgaaaatggaagggtcagggcaagggagtggaattccccacctcattccccacctaactgctgtcactaaggtactctccatctcaatgctcccaccactcaggtaaatcacctgccctctctcagtccatttcacatcaaacatgggtttaaaatcccacagtgtggctgggggctaaatagatcttgagtaggtgtccagtggaactcagcttcctcccagagagggtcaaggcagaacctgggatcacacagcagctggctccaccaggccttggctgctggataggactcacgactagactttgccactcccctcctgcacatcaagacgggtcgaaattccagaacaggctccaaggtgtgggcaggggcacccatccctgcaagaaaggcagccttggaaatccctgccaccctacccccactccccacccctgaggaaggaaaaccctgaatattgagtaagagaaacgagttcctgagcccttacatgaggggtgggggaagggcaggaggccacaacctcagctggagccacagaacagcaggaggaagtgtttggcctcagaaagaacagagatccaggtgaagagaaggttaatgtccaggtgtgaccagtggggagccacgtggagacaaattccaggcagagaacctctggctgcctatcttttcattttccaaagcttaggcgcttcatcagccttgggtgtagctggcccacctcactgaacaaattaaaaatcctgggagtggccgggtgcagcagctcacgcctgtaatcccagcgctttgggaggctgaggcgggcggatcacaaggtcgggagatcgagaccatcctggctaacatggtgaaaccccgtctctactaaaaatacaaaaaattacccgggcgtggtggcgggcacctgtagtcccagctactcgggaggctgaggcaggagaatggcgtgaacctgggaggcggagcttgcagtgagctgagatcatgccactgcactccagcctgggcaacagagcaagactccgtctcaaaaaaaaaaaaaaaaaaaaattcctgggagcccccaaggacatacaggagcaaagcatgtgtgaacatggttggaagggtttctgactccgaggcagtattctatttcttcctttgacagaggacaagactgacacccagaggggaggacaagcgtgtggttatcagctggcatatggtccagcatcctgcccacactccagtccctaacgctgggccaggaacactcctcctcccagcccactgaggtccaaaagctgggcatggtgacgggcacctgtagtcccagctacttgggaggctgaggcaggaggatcgcttgagcccaggaatttgaggctggcctgggcaacatatcaagaccctcaactctaaaaaaaaaatttaaattaaataataaataaagagtcctagagaggccgatgcccacctatgccctttccagggcagtttaattggtatcatttgtaaaaggtcttttccatcacccccaaagcctttgcattccctttccaagaaggtggctgtttactggttttggccccatgtgcaacagtaggccttggtatgatgctgccataacactcccatgtgacactccaggtgacatccaagtgcaagtctatgttcagctctggacagcaggggggaaggtgaggagagtcaggtctgtaaattgaagctgggcagggccctggctggctggagatgtgtgggcaaggtgagcaggccccatgtgcaccccagctccagtgcccactgatgtggctgaagcccaggttggttgtggtcaaattagaggtcctgagagagaagcccttaggccaaagaagtgtgtgctgggaagcaggccagggcagaggcccagggaagatctcagcaggggcagtgtgagcatgagcgagtgtgtgcacctgtgacagtgcagacagcccaagatcagagatacaatgtgcaggggggcctttggtgagtgtgtagctgtgcccctcccttctgagatacaggcccagcccccgcctccggaggctaagggggcacacctgggggtaggaggagtctgggaaggaaactcagctggaaatggtttaggcctcagagcccacatcctgtgggaggggctgtcaaggggcctgctgtcccggtcctgtcgcagtcctcaaagatgctagagtgacagtcctctaggggtagagatggtcgtcctcccaggagaaggtggcccggagacttggaggtgggatcaatcctgccagtcctggatcaggaggcctctgtcgggcgccgccccccttcctcctccatcagcaacaggcggcgccggccagcctcatagtcagcctcatccacactgaccagcaggcgaacagcctcccggcccacagcctctcgcagggcctcagtcaggaacacgccccgcagggcctgcagcagggcgccactcaggtagtcgccccagaaggcgtccagataggagagctctgagaacttgatgtcacaaaccacagagcccaggtcccttgagcgcagcactgcggtggcctgcccaaacacgtccagctgccgcgccagcgcctggggccgccgggatgccacgccctgctccaaggctggcccatgctcgcagtactctgctcgaacccggagccggatgtctgcaggggaaggagggatttgtcagggagggggccaacactagacacacttatggggaacgccacccttcctccctccagccttctccctccacccccttccggtagccacaccctagtcctgacacagcctccccggctctgtggggttccctgaccaagtacgtcctcctcttctccagcccaccacctcctcactgctccaacaagcctccccaccgccaggggtgctctttccctggatctgcacaacacttgctccctctcttcctgcaggtctttgctcaaaagccaccttgccaacaaggcccacctaggccaacctatttacagctgtaaccacccacccagccctctctgcagcatgccaggtcccacaccctgctccatttttgtccaaggcacttatcaccttccaacctcctctgtcagttactatctgctcattatctgtctctacactcagcatggagagacagatgacagcaaggaaggggtttttgtctgttttgttcacttgtgtaactgtggcacatagtaggtgttcaatatgtatttgtgaagaactaatgcatgaactaatggacttgccttaaggcaaccagcctcacaccctgcccccaaacaatgagattcacatggtgccaaccacatccccatccctcccatccacctgagccagcactgcggatgcgcagggtcctgaccaggcccgggaggcttgcggctggacctgtgctggctctactgggagtcaggtactctcttgccacagagctgctaagatgatgggttggaagcccagagctgctgggagccactgtgccaagaggagagaaggaagcctacgcagggccagccccagagataaaaagattcctgaggtcatcacatgagcccacgatcgtagctggattttcagctacactcaactcccctttttgctgaagccagtttgagtcggtttctgtcacaactctccccacatctgcgcaaaagaggtggcagctgtgtacaggggacaggacactggacttctaaggctatcctgtaatcatgaacttcacataccacctctcttccagaatttctgaattcccacccatcacttaggctagtgacagtaccccctctctctacacacccaacgaggctgtcctgaggatcagctgtgagccagaaacagcagcagccaacacttacagagtgccgactatctgccaggcgccaagtgcttgaatcacagaaactcatttaacctataaatgaccctgtgggacaggtcctattatcacccccaacttacagatgaaaaaatggaggccaagagaagtgaagtgacttgcccaaggtcacacggccagacaatggcagtgcctgacagaggtcatttaacctcctatgtccctgagagaaggctcctcaatcaatgaagtggattcccacacaggagccttcagcagtgtgacctgtgacaagtcacaacctctctgagcatgggttcctgcctaaacaaggggacaattcctactgtgaggagctgttaagaggattaaaaagagagcaatggatagaaaggaacaagctagcactgcacacagtgtccaaggggtgctcccagaatggcagccaccaacccctctgataggccaattgcctgacccttggggatgcagtagaatcagccctgtggggcagaggccaccttcagcccacttgacagatgaggaaacaaggctctgggagggaatgtctcatgctgtggctcccttcaactttcacagaccatgtcagccacagagcagaaaggagaatgcagggcccctgctccccaagacaacttcacagccctgcccacttcctccttccaccccaaacccttcctctttctggctctaggggaaccccatcctctccacccaacgcccagggaagcctgcccagcctcagcccccaggccctcccatggcattcagacccagctgtctctacccagacgaccagatccttgactgcatccttgactccagtaagcaactggccatgacctcaatcaatgtgggtgggagagcagggggctgggaggagcagcacctcttccaggccacccaggagtggttggccacagaggcagggccaggtggcggagtccaacagaccttgaggtgagtcccagctctgccactctctaagctgtggggccttgggcatgtgaccttacctctctgagcctgtttccccatctgaaacacaaacaaacaagaggtccctgctgcacattgaagtcacaaggattaaatgaggcaactcataaaatgcttgcttacagccctacgacaaagaaggctcccagaaacaggaactgtaatttcgacacccaactccctacacccatggccctcacccaggccttcatctctctctcacgggtccctaagccaacctcctccttggactcctccagtccctgccgtgtccccccataccctgcactccagtcacaagaaaatgttcccaacaagagccttacttacaaaatgacctgtccacctcctccatccagaacatttgccaaggctcagctcgtgggagccccacatcctgcccagttgaatcctctctcagctcgtccttctccccagcatggacctctggtataagttctcaatccacccagagcccccaccatgtcagagtggacaggtcacagggacaaggccagagcaatctccatgcccccattcaatctcttattcaacagatattttatgaatgccaggcatgctagggtgacacaagaaccttgccacaagtgggacggggagacatgtaacccacagttaggaagcactccccacaagccaggctctactcaagggctttcctctctcagcccacctaatcctcagagtactttcaccagccccatttacagatgagcaaatccttcagcagaccacacactcccacctctgagctggaaaacatgatcatggtgcacagggaaaagacagggaggtgccaccaggcaataggagcaggcgaggcttctctgagcctctgctccacccttagcacccaatcacgtgctttacccctccccaaaataatcacaacaggtgacacctgcctatagcttttactacaggctggcacggtactacatacttcacatctgctgacccctttgattgtccccacaacaatcaggtgatgctgttattattccctttctgcagatggggaaattgaggcacacaggttgagtcacctgcctaaggccaccagataggaaatggcagagctggaattttacctcacgtgtatggctccagtgcccgagctcttaactacccctatcctgttggctacctcacacagaaccatacacatcaaatacacaactaaaagacatcctgagagccagcagagaaaattagacagggcgagttatagttcagattgaaaggatcagagaggatctctctaggaaatgacatctgaagtaaaatgtgaaggaggacaagtaggtttagaaagaaaaacaggagagaaaaaaagaatggcattctcaggagagatgagcatttatggaagtccagagagaaaatgaacttcaggcctgcacaggctgaggggccggcgtggcaggaacgtggaggggagaagggcgctaagggagaacgggcagccaggtcagggaggctgatctcaatcccaatcgccagcagactcaagattctagggcctctggaagtgaccacacctctctgtacctcggtggcctcctgtgtaaaacaaggctccccctaacatccgcccatgtggggttactgtgagaattcaaggctcaatgcaaggaaagaggggaggccaggaaggccaggcatgcagagaggacaggaggcaggacctgccaacttaggggcaactccagctgtgctgtgaagtggcaggtgggtagaaacagggccagggcagcaggcaggggaagggtcacaaatggctgtccaggatgggagcagtagacatggagagaagtggaggaactgtccagtgtggccctgaggtggcaggcaggaagagcacccagcaccatgtgcgctggaccgtgggctggctgcatcttttccattttggcagctgtggggaaaagttccctgtccctgggagggtggggggcaggtgccatgccttcctagagaggagagctgctcctgcttcctgcactcaggtgggcccagcaccctcttgtcccccacccccacctcaccagtctctcttctggggcaaatgggacatcaagtgaaatgggcttctcagtgggggaccagggtgaagttcaagggagcaggccctgggctgggtgtgtctgggagcccagagatgaacctcactcaagtcgtctctctaagagttcctagttgggtggtgataaggtttggatgtatgttctctccaaatctcatgtggaaatgtgactccaacattgtaggtggaacctcatggaaggtgttggatcatggggctgggtccctcatgaatcccttggtgatgagtgagttcttgctctggtatttcccgtgagagctggttaagagtgtggcagctcccccaccccccaactctcaccatgtgacaagcctgctccccttggccttccaccatgaatggaagcttccggaggtcctcaacagaagcagatgctggcaccctgcttcttgtacagcctgcagaaccgtgagccaagtaaatctcttttctttacaaattacacagtctcaggtatttctttatagcaacacaaaaatgaactaacaaagatgggctggggaagaagaggacctgtgctcccacaacactgggagatgcttccggccttgctggagagaggcagccaaggtgcttcagtggagagaccccacccccgccccgcccccacaccaggaccagcaccagccccctctggacaatggtgggaaccctcccagcatcttggcttgcctccctcgtctcttctccacaacaaagccagcatcatcatgtcaaatggaaagtttttcaactcctactgagttcaactcctactgaattgaggcaatgaggagaagctgcctccaactccagagagggataagcagccatcacctgcttcctgatggaggcgcacaacacaccctcagaagcgggattgaggaaaacaaaacatcaaaccagaatctgatcaagcctctccagaccccactacccatcttcaggaaatacaaaagacagggtagaacacactgaatcaaccctactgcaggatacagtcagcaaaatccagtcttcgggaaatgccacaggacaactgctttagaaaaatacaacgcaaggcggagaaagagagatggtaggggaaaggagagacttcagagaacctacatttataaaacaactgaaaatctgagcaccgatcagatatttgatagtaaggagttactaatcttttttggcgtgaaaccctatttttatctttggccagccacagtggctcacacctgtaatcccaacactttgggaggcccaggcgggtggatcacctgaggtcgggagttcgagaccagcctgaccaacatggagaaaccctgtctattaaaaatacaaaattagccgggtgtggtagcacatgcctgtaatcctagctactcgggaggctgaggcaggagaatcgcttcaacccgggaggcagaggttgcggtaggctgagatcacgtcattgcactccagcctgggcaacaacagcaaaactccatctcaaaaaaaaaaatctcttttcaagatacacagtgaaacatctacagatgagatcatagggcaaccagaattgactccaaaattcctaattatcctaagatgagatcagccatgagttgacaatggctaaagctagtctatctactttggtgtattttccatagaaaaaattgcaggggccaggcggtggctcatgcctgtaatcccagcactttgggaggccaaggcaggtgaatcgctttgagctcaggagttcgagaccagcctgggcaacagggcaagatcctgcctctaaaaaaacacacagaaattagccaggcatgctggatcacgcttgtagttccagctactcaggaggctgaggttggagaatcacttgacctgggaagcggaggctgcagtgagctgagactgcgccactgtgctccagcctgggcgacggagaccctgtctcataatttaaaaaaaaaaaaaaaaattgcaggggagaagcaaagctgatcctgtcattcaaatcctccaactgctttccataataaaaaaaaaaaaaatgcaaagcccaggccctgcaggatctgccctggttccctctcccgccctcacctcctaggggtctccaccctactcctccattcctgtcagtttccttgccatcctccacgctgcccttgagcactggcacatcccacttgggcctgtgctcccgctgtcctctccatcgggaacacccttcccctgacatctgaaatctctctcttggctttctcccaccacagcacaagctcaatgagggcaaggtctcccaccccggctgacctagcatatagtaaataccctataaatacatatggaataaacaaataaacaaacccaagtttcagccaagctctgccccctgccactcagactagtgaccgcctttccctgatcgtgcctcttcctttgcaagatgtcatcccacctcaatggctgtcttgagaattcagggccgagtagtgcccaccacagaccctgagaggcacatggtcgctcagatgtcctgtgtccaaccctaggaccaccaaggtgtccttcctcactgtctcaggcagtcgagagtttgtctagttctatccctcaatggagggcagctggctgggggtcacaggtatcacaggtgaggaagagtcaagaatagcaggcctcttcttcagtcaggcctccttccacctctggcattcggcctctctaaaaagtaagccattccatttttcagagggaaaaacaggagcccagatggggagagcctcactccagccccaccctgcctggtgagtcagcagtcagacctgctcacccatctcccatcaagacctagccaagccctggttaacgacctcctcgcctcgggaaagagacctgaagcctcccttggcctgttcctatcttccttgaggcaatgactccctcacctgcccagccagcctggtggctctgggaattactggctgattcgagggggagtcaccaccaggcaaccaccccctcaaaccctgccgcgcaagcccacatagctgcctgaggacccagggctggctctctaggtctgttccttctgacagcacccagcacaggttatctgctgcctcatctacaaagcaggcatgatgcccactccctggagggccattatgggcactaggagggggcaggtgcgcgtgctttgtgggctggagaaagctctgcagatggtagaaggaagcacccccaggccaaggtctcctagaagacaggacatgccagcatctcaccagctccaacttggtcttctgacctccagcttccacaatggcctcctcccctgaacccttccactccccccaggggcctcctcccctccctcagcagcctcagccctttgcaggggctcggcaccacccctggcctcatgtttcattagggcacttgtcactagctgatgccgtctgctacgctggcttattttcgagttatctgtcttgcccactataacgtaaactcctggaggctgaggactttcttcacctggtccaattctgagccctccgtgcctggaacagtgcttggcataaagatgatcctaataaaaactggatgaaggaattaacaaacccttccatggctccctcacccaccaccccctagaataaaatccaaaccaaggccccccacctgcctcatctccccctgctcccacccacaaagcctctgctccagacagactcagccctgaccacatccggctggggacgttgtacgcatgagtcactctgccagaatcacccttcccagctcctcttccagcttccttgagcttgttctagacatggcacctccacaaggaaactggggctggccaggagactccctgcacaccccagagcccctgcactcacaatacccgtgccacctgtcacatcagcctggctgccacttccctcatctgtcttccctgcagcctgagagctcgaagaccatatctgatcccttctgtgtttcccaagcttgcccaactagagaaaggagtactacagttgaggcggtgctcattgctgtgtcctccccacatgaccaagtggaatttctcaagagcaaggtcaaagtagtctcacagcagagtccccaacccacccaacccatcgtgtctacagtcagccctatggccagtgcccttccttatttcctaggtcacttctcctcaccctctccaacacgacccccaggccagacctctgcctagtccttctccacagacctcacagcctcttcaagcgattaatttaatctacgtaacacatgcctagcagagcacctactagaagcccagtgcatcctaaacactttgaaaaccctaacttgcttattaactgattttccagatggagttagagttccctgaagaggaatcacatcacgtcaccctcctgctcaaaacccactgccagtgcctggcgcatggaataaaatccaaactgtcatccctgccgtggcccgcgaggccaagctgctccggccccagcctggctcctccacctgctcccaccctctcttggtggcacttatcattgtctaaaatgatcttcagtttcactggtcacctgactaggtcagctccacaagagccgggaaccttgctgcagcactcctgccccaggcacactgcacagcaacagtgagaacaaaccctcgtacagcgtgtgccgggttgggcactgctccaggcatactgtgggtaaatttgttttctcacaacaatccaaacagggaggtgattatcagcctcactttacagatgtggaaactgaggtggatggctgggtgcggtggctcacgcctgtaatcccagaactttggaaggctgaggcgggtggatcacttgaggtcaggagttcaagaccagcctggccaacatagtgaaacccatctctactaactaaaaatacaaaaattagctgggcgtggcagtgggtgccagtaatcccagctacttgggaggctgaggcaggagaactgcttgaacccaggaggcggaggttgcagtaagccaagatcacaccactgcactccagcctgagagacagagggagatggcgtctcaaaaaaaaaagaaaagaaaagaaacgaaactgaggcagagaggttcaattactggcctgaggtcagacaacttatttaagtgccaagaccaggatgtaaatcaggcagcctgatccaggatcgttgtttttttaccccgtgatatgctgccactgcacaagaaatgtctgaataagtaaaccccggcagatgtttgctgaatacacaaatgaaactagggcagggggttgtcaggaaaggcttcctgaaggaggtggcacaagatctgatccttcaacaatggacaggatgtagacaggcaagatggcgagagaaaggacaagaattccactgtggtgaacgagagctgacacccatctgccaagtgtgtcacatcccccagaaaaatgctcatttctcccaccctctgaacccacccggggcactctacatgcattgccaaagcctacagacacctaccacaggtcactttgccttcagaggaaggtctggcgggctctgactgctgctggggtgcggctggggcccctctccgccgccgtctggcaccaccactgggccggccccgactccgccgctgccgcttggttgggggggagcctgaggggaaaaaaatggggcaagttgaggaccaggatgacagctagagtgcccaggtgtatgcctggaaaagaactcaaggtgttctcggtgctgagaccctgagtgagccagtctgcctcccttcttcagtggccctgtctaaaagatgaagagtaccatctagcatcatctagaagggcaaatgagtacaccccagcacgctgcagcaggctcactccaggtgtgatgtgaccctagagaaatccctgcacacttacaccaggagacacacacgacaaccgccaccagggcattgtttatcatgatgaaaacctgagaacaacatatctggcaagaagaaacaggaatatagggagatgtccaggatagactgtttaaggaaataaagcaagatacaaaataagtgtctacagtgtgctgtactttgcataaggagggaaattaagattatatatatctgcaaaatgaaacactagaagcacagactagaaatgaatgaattgggggtgaggggcacccagcagtagaaatgacatgtctaaaaatacttttcatacttttttttttgagaccgagtttcgctcttgttgctcaggctggagtgcaatggcacaatcttggctcactgcaatctccgcctcccgggttcaagcaattctcctgcctcaggttcccaagtaaccgggattacaggtgtctgccacgacaaccggctaattttttgtattttaagtagagatgggtttcaccatgttggccaggctggtctcaaactcctgacctcaagtgatccacccgcctcggcctcccaaagtgctgggattatgggcattgagtcaccaagcccagccccacactttagttttgacttttgactcatataactgatttacacacttaaaaagttaaaatgaaataaaccataaaattaacacaaataggccgcacacggtgtggctcccgcctacaatcccagcacttttggaaggccgaggtgggtggatcacttgagatcaggagttcgagaccagtttgaccaacatggttgaaaccctgtctctactaaaaatacaaaaatcagctgggcgtggtggcgcctacctgtaatcccagctactggggaagctgaggcaggagaattgcttgaacccaggagctggaggctgcagtgagccgagattgtgccactgcactccagccagggtgacagtgtgagaccctgtctcaaaaaaaaaaaaaaaaaaaaattaaacacaaacagaagaaaatgaacctggtcggatgttgtggttcatgtctgtaatcccagcctacgccctaggagttcaagaccaacctggaacccgggcaacatggaaaaacccgtctctattaaaataaaatgtaaaaaaattagccgggtgtggtagcacgtgcctgtagtcccagctacttgggaggctgaggtgggagggctgcttgagcccaggagatctaggctgcagtaagcagtgtttgcgccactggactccagcctgggaaacagagctagaccctcaaagggagaagggagaagaaaaggaaggaaggaagggagagagggacggagggagggagggagggagggaaggaggaagagagggagggaggaagggagggaggggattgtatacataattggtaacaggaatactcagatgaaacaattattcaagtaacttgaagaacattctgactgtaaaatctcaatgggatatgctcagagaacaagaaacacaaataaaatctatgtttcattcactagatacagtcagcagttgtactgactttgttattttgatgctatttaattactgttgtaaaataaatcaaacaaacccacatcttaatgttattaagaggaaagacttttagtataaaaaagtctggctggggctgggtgcagtggctaacacctataatcccagcattctgggaggccgaggcgggcggatcacctcaagtcgggagttcgagaccagcctgaccaacatggagaaaccctgtctccactaaaaatacaaaattagtcgggcgtggtggcacatgcctgtaatcccagctactcaggaggctgaggcaggagaatcgcttgaacccgggaggcggaggttgcggtgagccgagattgtgccattgcactccagcctgggcaacaagagtgaaactctttctcaataataataataataataataataaattaattaattaaaaagtctggctgggagcagtggctcacacctataatcccagcactttgggaggccaaggcaagcaggtcacctgaggtcaggagttcgagactagcctggccaacatggtgaaactgcgtccctactaaaaatacaaaaatcagctggatatggtggtgtgtacctgtagtccccgctactcaggaggctgaggcaggaggatcacttaaacctgggaggcagaggttgcagtgagctgagatggcgccactgtactccagcctgggtgacagagtgagactccatctcaaaaaaaagtatttgtgatgtttttgtttctttgtttagagtggggatctcgttctgttgcccgggctggagtccagtggcatgccaccacacccggctcgttttttttttttctctgagacagggtcttgctctgtcacccagactggagtgcagtggcatgatctcagctcactgcaacctccaccttcccaactcaagcaatcctcctacctcagcctcctgaatagctgggactacacgtgcacatcaccatgccaggctaatttttatattttttatagagacagggttttgccatgttgcccaggctggtctcaaatgcctgggctgaagcagtccacccgccttagcctcccaaactgctggggctacaggtgtgagccactgcacccggctaggttttttatctttttagacacagggtcttactatattgcccaggctgatctcgaactcctggcctcaggcaatcctcctgcctcagccacacaaagcactaagattacaggcatgagccaccaaacatggctataacattaatctttaaaatactaacagaaactttttgaaaagtcaagtctctaacactgttcactgaaagaacctagaacaatatacacactcaacacccaggttttggtctctaaataccacagcttccttgaaaaacagctgattctagggtgcggaagggaaagttcaaagtcagcccaggacatcttgcagtgccacaaagcaggaagcacacaaagaatgatacaaacacatgaagaagacacaagaggctagccagttggaactgcaggaagactgactgactgtaacaagtcagtaaatagtgtatgggtctatagtgacactcaaactcaaaggggcattgggggaatacctcttgaaagagaaagaaaaaagaaaaagaattagaaaaatcaccattttgcaaacaccaatgtgataactggttcaggcaaagctcatagatgtgaaacccactgagtaaatggctattagggaacaggatatgccaaagtatcaccccatagactgtttactaaccatgagaactaaatgtcccttcacaatggacaaacatggcagatatccccttaaccaagtgaccaaactttcccacatcggaaaagccaggccgtacatgcctggagatgtactccaatatgaactagatggcagcaaccaaggattattcctgctaaagatgtataaactgaatctaaccaagcctcagacacaattcccatttaacaaaaaatgtaagggaaagagggacgagttacataactccatcaggaaaaaaacagacagataaagaaacaatcaggacattctacaaaacaaccggcctgctagggtgaaaaaatcaatgttacaggaaaaagaaaaaggtatggggtgtaggggcagtttctgtgctatagcaggagacataacaactgaatgcataccaactcaactatgaatagattctgaacggtcccacagtctggggatttttgaaaatggaccattagaatgtcagagaattcgtgtttattttcttaggtataatagtcttaaagtggtacaggagaatatccttattctccacggatgcctaatttaggggtaaagcatcctgatgtctgtaatttactttcaaagggttcaacaaaaaaatccagaattacgtatacacataaagcaaaagtagcaaaatcttaacaattattgaacctaagtggaagatgttaactgtactaatctttcaacttgtatgtttgaaatttcacataataaaaagaggggtggccagggcgcagtggctcaagcctgtaatcccaacactttcggaggcccaggtgggcagatctcttgaggccaggagttcgagaccagcttgggcaacatggtgaaacctcatctctactaaaaatacaaaaaaattagccaggcatggtgtcatgcgcctgtagttccagctacttgggaggctgaggcaggagaattgcttgaatctgggtggcagaggttgcagtgagccgagattgcaccactgcaccgaagcctgagtgacagaatgagattctgcctcaaaacaacaacaacaactagaggtggctggcatgatggctcatgcctgtaatccagcactttgggaggctgaggtgggaggactgcttgaggctaggagttcaagaccagcctggacaacaagggggagaccacacctctataaaggatgaaaaaattagccaggcatggtggcatacccctgtagttctagttacttgagaggctgaggtggaaggacagcttgagcccaggagttcaaggccgcagagagctatgatttcatcactgcactccagcctgggtgacagaccaagcccctatcttgaaaaagccaaacagaaaaaaacaaaaactgggggtggtgagaataaataagttaattggggcatggcaattaaaataatacaattagagatactcagcatgaataaatctcagacacatctagcaaagacagccaggtgcagagtaatacccacaatgtaatgccatttaaacgaaacacgaaactatgtgcaacaattctgtatgttgcttcagaacagagtatctgtagcaataaacacacacacacacacacacacacacacacagtgaaaatgagacagaataacccctcaggccccttccttgatgggcacaattcataaggaaaagagggatgctgccattacacccacccagctgggctcacctgtctcccactgaccctgctgagaatttgcagaactgcttgactgccgacggcgacggcagctaccctctgtcctctttgaagagctggaggtgccatagctatagcgttctggagacactggaggaagagaagaacaggaagaagcattcagcctcctggccctaattcccacccctggaagaatgcctgcaccacgaggtgcctaagttccccagtagtcagagcccaaatacccactcattctcaaacacctcctgcagaggttgctcagatgcctcctaagagagagaacttatcacgacttggggcaatctaacccacgtctacggcagctcaaactgtcaaggttattctgttgatagtcatggtaagggtccctgtaatggccctttgccctggcatcaactgcccccagctctccccaaggagtaagcaggcctctgtgcaggctccccaaatcttctcttctagagcgtgatcttcagacatagatatccaaaaatgctgtcagctcttccctagagctgtccttctcctgcttatctaaatcctgtgggcttactctgggtcagggaaggccataatcccccctccccaaactagccactgcccctttagtaacccagacaaaggcttggtctattcatgcacacggctaccggcagcctgaacccctcccagcttctcatgtgaaggctgctatcctccaggagcacttccttcacaaggattaagggcatcaactctggggacaagttggctaggtttgaatcctggctcccacacttcccagctacgttctctgcaagccccttcatgacataacttcttacctccctctcttccctagcttgggtcccctctgctcctgccacactggcctctgatgatgccaaactcattcccacctcaggccttggatgctccctgggattttctcccctggggtctatgcatggctggcagtgcagcctcagggcaaagcctcccttcaccttgctgctctcctgactctctctattccattacttttagtcttcctacaacagcgtctaaaaataagttctcttattatctgattgcccccactaaacttaaacttcatggaacaaacaccttgtcagctccatcatcctgtatccctcctaggcccagcaaacaggattgttattatacgtgcaaactgcttaacttctctgaacttgttattttcttggttacagtgaagacagtaacaggacttccttgtgagattactgggagactataaggcactagttcatatgaagggctgacagctgtgcctggcatgaaacaagccctccgtaaacagtggccaaaatcatcatcactgatgtggccaaattcccaaagccatgctttcttcctcttatgttgctcattgatattgtgggaagagagagtagcagaatgggacataagctgcctgatatggcactgtccgtatcagggcaccagggaggcccagcgggagccaggccctttcctcccaggaagtgtgacaccctcccattcaaccgtacctggccggcgccgcttgcgcgccaggtgcggcagcaggtcgtggcgggccagcacgcgcaggagttgccccagcagccgcaggttgctctcgtcgcactgcccgcggcgctccagctccagcaggagctctaggccgctgcgggcccgggctaagcctccggcggcgccaggagcctcatccagcagaaaggccaggagctccagctcgcactcggtcagttgcccgcccaccacctcgaacatacggtgaagcgacagcatcccgtagtagtccaggcactcatcctcctcccagcacggggccggggtcgacccggatagcgccattcccgggggagggaggcggaacaagctcagaacccggcctagaacccacacagcggggagggggcagtggtcagcgacgcggaggcccgaaccccacaccgccagcgcgtctcccccgcccaatcgcgccgggcagggccgctcccgcacccccaaccgcctcggcctccccctcccccgggagggaatggtcccgcccgaggtcccctaagaacaggtcgggacgccggagcccgctcggcttctgcccccaccaccgtgctacgttcggagctcgcctccggacctgaccaaacgatgcggcccaaacaagcctcggggcccaccccggggctccctgctgactgcccctgactctgggtaggactgcccagacgagccccttttctccgtccagcggtaccgtctgatgagtcccccggctctacgcaagtggtacctcccgaaagtgaccctctgccccctacacagaggagcgacccaggcagcccctttgctccacacaggtggtaccgtccgaacccgaccccctcgccctgcaagggcggccccgcccgctccccagagcccaggtggtcctgtctacccgccaccagtcaccattaggcctctctggatcctcaccagattctggcgtccgatgactcctgggcgacggccgcagccacttgttttggatctttctggcaccttctctattattacgcctgcgtcacctcgcccctcctccttcccccaactcgcgcaggtgcgaccgccacgccccttcggcgcatgcgcagaacgaggcctccaagccccgcccttcctgggccgcttgacctgcccccaaccgaagcatcttggttcgcgagtgctgcgcttgcgcagagcgagagcacgccgcctcttgggctgtatctggtacccggttccaggtccctacttcctgcccgtgactcaagccaccggggccatgtagcgccacgtcacgagtagttgtaactactcatctcataaactacagccccctcctgatcacgagctagacgcccacatcaccactgcccctagttgcccgtggcaaagtaacacaatcactactttcccgtctcccagtaaactcccaggccttatatgatctggtcctgggcactcctccattagattgtccctcacttctagtgacaaccagggatctacatctcaactgtgctctctcgtgatcccaaatggaaatcccgcccccccaccaccacccccgcagtctataagttccttcccctgatcaaaaccagaattccctcatctcacgttcaggacggatacctccttccaagcggcaacagaaccctccattccgactgtgtacatctcgatggcgtccatcacgacccccatcacagtcagatgtctccacccagagccaaaacggcccctccgtaaccccttccaatctctgccctccagggtcgcccagatacccgctccctaacttgcaacaactagagagggtctgtcagggagtctaggctgtggtgtatgcgtgtccccttaccgcggggccttgggtgtgacggtcgccacgccccccacttaggtgactcaaggtcaggacctgcatgtacttgagacaagtcccctccctggacctcttcccacccccgcaattaactcctcttgggagtcgggagatctgggtcctgcctagcactggcccagtactggctctgcctgagctgtagcagtgaattcaaaagaatcggctgcgcgcggtagctcacgtctgtaatcccagcactttgagaagccgaggtgggcggatcacacgaggccaggagttcgagaccagcctggccaacatgatgaaaccctgtctgttcttagccggatgtggtggcacgcgcctgaaatcccaactacttgggaggctgagacaagagaatctcttgaaccagggagcagtaagcagagatagtgccactgcactccagcctgggccacagggcgagactttgtctcaagaaacaaacaaacgccaggtgcggtggctcacgcctgcattcccagcactttgggaggccgaggcgggcggatcacctgaggtcgggagttcgagaccagtctgaccaacatggagaaaccccatctctactaaaaatacaaaattagccgggcgtgctgacgcatgcctgtaatcccagctactcgggaggctgacgcaggagaatcgcttgaaccctggaggcggaggttgccgtgagccgagattgcgccattgcactccagtccgggcaacaatagcaaaactctgtctcaaacaaacaaacaagaccggacgcggtggttcacgcctgtaatcccagcactttgggaggccgagacgggtggatcacctgagatcaggagttcgagagcagcctgaccaatatggcaaaaccccgtctctactaaaaaatacaaacattagccgggcgtggtggtggacacctgtaatcccaactactcgggaggctaaggcaggagaatcggttgaacccgggaggcggaggttgcagtgagccaagatcgtgccactgcactccagtctgggcgacagagtgagactccgtctcaaacaaacaaacaaaccctccaagaaatcccttcccctctctgggcctcagtttccctacttgtgaaacaaatggatggcaatggtaagctacggaagcatagtcctgggctaaactcacaagggggcctggtaagtgactatcattaaatcaaacgaagagtagggagaataggaaagcaatttaacaaactgtgaaggattctgtcttgctaagtgggttgtagtgggcgcctacagtgtatgagcgctgtgcatgtgtgatatcatccaatcccctaaacaatctttgaggtggctgtgactcaagctcacttcacaccagtaaaacagaggcccggagaggagaataactccaagtgtgtcgggctctaaagctgtactctcagaaatgctccgtctcttcagctttgaaatgacatctctgtcaaggtctcccgccgcccagttcactccatgggcccaacgctcaccaaaggttgcccgagtttctctacagaacttgccgacgcttagcccgggagcgacccagagaaatgcgcaggcgcatctcctcgccctgagccccgcccacagggcgaagatgtgtgcgtggataactcccagagccccgcctgtgtggcaacacgcaggcgcaaggtcgcgtgccctgcgctgcaggctctgattggtcgccacgggtaagggcaccgcccaatgggaggtgtggatagtgaggggtcccacacgcctggagccgagggtctgtgtcaagagcggcaggggctgcaggagataagagaaacgggtgagggcgccgcgcggggctggactgggaagagaacgctgggcggacggagggggcggaaggaaaactaaggggtctgcagggatcgaagagccttggggcctgcgctagggcgggagcggcgcgggctggaaggagagcactccttcctgtgtgccctggggctcctttagtgtgcgggagcctacgctggaactcgcccaccacccactgctgcgagctctcaccctgccgaggagctcagtctggtaggagacaagcgttgtaaagcgggaaagttgaatttccagggccctagtgggttccttcctggaaagacttactgatatactgtgtgaaaaacccccattctttccctaagtagttcacaattcaagagtgggagaaagaatcgtagacgaggaaagggcaaatttcaagtctcccgggccacctcgtagacatttattgggtacctgctttgtgcaagctttgcagcaggcactgggcctcgccctaggggagttctctgttggaaatggggctgtaatcaaggaaaaatggaactctcgggcccctggttgcctacttccaggaaggtcctttgtggaatggctgttgtgtgcaggggcctggcaactcaaaaattaggaaggggattggaatagtagataaggaaagtttagctccagctcctttagtgaataatttactcaaggagtatgtattgggcattaactgaaagcagggccctgtactgggctgtgtgttttgggaattcacagtctaatggggaagttggtctggtagaaatggactgtgcatagggacagttaaactcagggtcggccaggcagtggcttacacctctaattccagcgctttgggaggcctgggtgggaggattgcttgagctcagtagttcgagaccagcctgggcaacatagggagacctctctacaaataatttaaaaattagccaggggctaggtgtggtggctcacacctgtaatcccagcactttgggagaccatggtgggtggatttcttgaggtcaggagttgaagaccagcctgggcaacatgatgaaaccccatctctactaaaaatacaaaaattatccaggcgtggtggtgaatgcctgtagttccagctactcaggtgaccgaggcgggagaatcgcttggacccaagaggcggaggttgcagtgagccgagatcgtgccactgcactccagcctgggcaaaaagagagaaactctgtctcaaaaaaagtaaaataaaataaataaaaataaaaatttgccaggcatgatggcagatacctgtggtcccagctactcaagaggctgaggcaggaggatcacctgagtccaggaggtggaggcctcagtgagccaagatcgcaccactgcactgcagcctgggcaacagagtgagaccctgtctcaaaaggaggaaaaaaaaaaaaaaacctctcaaggtctcacttcccaagggaggctcactgcagcctccacctcctgggctcaagtgatcaaaccaccttagcctcccaaagtgctaggattgcagatgtgagccaccacacctggcctgggagcatttctcagtcactaaatatgtactgtgtgctagacattgttcttggcactggacgtgcttcagtgatgtgcaggctaaactgctaccgtctaggtgcttaatatgagcaacttttttttttttttttcctccttgagacagagtctcactctgtctccaggctggagtgcagtggcgcaatctcagctcactgcaacctccgcctcccggtttcaagccattctcctgcctcagcctcccaagtagctgggattacaggcgtgcaccaccacgcccagctaatttttgtattttttttagtagagacggggtttcatcatgttggccagcatggtctcgatctcttgaccttgtgatcgcctgccttggcccctagagtgctgggattacaggcgtgagccactgcgcccggcaatatgagcaacttctatatgcaaggctgtaaaccagactccacctgccctctggcactaatagattaggtgaaaaagaggtaaagaaggtgggtttgaattcataaaattagctgctaggcctgggagggaggcagtcatttgttgagtgtactctgagtccctgctgtgtgaaggggcctgggtggggttgagcccacatacgtagaagggaagatggggcatatagagggaagtttgaaagttaaaattcctgtccctgctcagaggttttgttgctgactggagcctccacaatgaatcagacccacaaactctcagtccagtgaggaacagtgagatgccaccccaaactcatgatatttgccatgatagaggtggcacaggataccataggaaccctgaggatgtagagatgtcagagaaggcttcacaaaaggtgctgggtaggagtttgtcagacaaaaagaggagagaagtttcttggcaaagggaatagcaacatcaaagacttagggtctaaaaacaatctttctggagaactacacagggttacagctgacctttacaagtaccagggactttgtgtcagtactacttttagccccattttacaggtaagaagacaacctcagaggaagtaagtggtagagctcagattcaagccaagggcagtctggttccagggcctgtgtttttaaacacttgggtgtatctgtgtgtgtatatgtaagaggcagaggaaaagcattgcacaaagagaaagctgcacgcaggcaaaggctatggtattctcagaaaaggtgtgcctggccctctcggtaaagaggccaggctggctgggccgggtgtggtggctcacacctgtaatcccagcactttgggaggccgaggcaggcggatcacgagggcaagagatcgagaccatcttggccaacatggtgaaaccccatctctactaaaaatacaaaaattggccgggcgtggtggctcatgcctgtaatcccagcactttgggacgcccaggcgggcagatcacgaggtcaggagattgagattgtcctggctaacacggtgaaaccctgtctctactaaaaatacaaaaaattagccgggcgtggttgcaggcgcctgtagtcccagctactcgggaggctgagccaggagaatggcctgaacctgggaggcagagcttgcagtgagcagagattgcaccactgcactccagcctgggcgacagagcgagcctccatctcaacaataacaacaaaaaaatacaaaaattagctgggcatggtggcgcacacttgtagtcccagctactcgggaggctgagacaggagaatcacttgaacctaggaggtggaggttgtagtgagccgagattgcgccactgtactctagcctggcaacagagcaagagtccatctcaaaaaaaaaaaaaaaaaaaaaaagaggccgggctgttggccggggtggtggctcacatctgtaatcccagcactttgggaggccaaggcgggtggatcacctgaggtcaggagttcaagaccagcctggccaacatggtgaaaccttgtctctactaaaatatatatatatatatatatatatatatacaaaaattagccaggcatggtggcacacccctgtagtcccggccactcaggaggctgaggcacgagaatagcttgaacccaggagcgagaggttgcagtgagccaagattgtgccactgcactccagcttgggtgacagaccaagtctctgtctcagaagaaaaaaaaaaaaaaaaaagaggctgggctgagtggtgtttctctcctgcaggctgccgtggggtgtgtgtaggcttcagagacatgggatcacggaagactgaagcagaaacagtggattaagacttcctgagcgatagctggtgagtagtgggatgtgcaagagaattccacctccccttggtttcctgctgtctcactggctcctgcccctctttctccaggcactgccttccccacaatggcagaggtggtggctgaggtggccgagatgccaacacagatgtcaccaggggcagtggagatgtcaacacctatgtcggcagagatgatggagatgtcaacagaagtgactgagatgacacctggggaggcccttgcctcatccctcttcttccagcatcaccagttcatgtgctctgagtgtggcagcctctataacacactggaggaagtcctctcacaccaggagcagcacatgcttgctgtctcagaggaggaggcactgaccacacagaatgttggcctggagccggagctggtgccgggtgctgaggggcccttccagtgtggtgaatgcagccagctcatcctctcccctggggagctcctggcccaccaggatgcccacctccgagagtctgcaaaccagatccaataccagtgctgggactgccaggagctgttcccctcgcccgagctgtgggtggctcatcgaaaggcccagcacctttctgctacggtagctgagccaccagtgccacctcctttgcctcccccaacaccactgcctccaccttctcccccatccgaagtcaagatggagccctatgagtgtcctgagtgctctaccctctgcgccacccctgaggagttcttggagcatcagggcacccactttgactccctagagaaagaggagcgcaatgggttggaggaggaggaagaggacgatgaggaggatgaagaagatgatgaagagatggaggatgaggaggccatggcagaggtcggtgatgatgctgtgggaggtgacgagtccacagctggctgggctcagggctgcggggactgtccccagcaccagccctcagcaggggctcgccggcaacaccggcggacggctcacagcccggcatctgccacccaccccttccactgcagccagtgtcagcgcagtttcagctccgccaaccggctgcaggctcatgggcgggcccatgttggtggcacacatgagtgtacaacctgctccaaggtcttcaagaaagcagcatcgcttgagcagcacttgcggctgcatcgcggggaagcccgctacctctgtgtagactgtggccgcggctttggcacagaactcacgttggtggctcaccggcgggcccacactgccaacccattgcatcgctgtcgttgcggcaagacgttcagcaacatgaccaagttcctctaccaccggcgcactcacgccggcaaaagcggggcacctcccacaggagcaacagctcccccagctccagcggagcccacccctccaccaccaccccctgccccacctgcccagctgccctgcccacagtgctccaagtcctttgcctcagcttcccggctgtcccggcaccggcgtgcagtacacgggccccctgaacggcgtcaccgctgtggggtttgtggcaagggcttcaagaagctgatccacgtgcgcaaccacctgcggacacacacgggtgagaggcccttccagtgccactcatgtggcaagacctttgcttctttggccaacctcagccgccaccagctgacccatacgggtgcacgtccctaccaatgcctggactgtggcaagcgcttcacacagagctccaacctgcagcagcaccggcggttgcacttgcggccagtcgcctttgcccgcgccccccgcctccccatcactggtctctacaacaagagtccctactactgcgggacttgtggccgctggttccgcgccatggcgggcttgcgactgcatcagcgggtccatgcccgagctcggactttgacgctacagcctcccagatcaccatctcctgccccacccccacctccagagcctcaacagactatcatgtgcacagagctgggggagaccatcgccatcattgagacatcccagccactggcgcttgaggacaccctgcagctgtgccaggctgcactgggggccagtgaagcaggcgggctcttgcagttggacacggccttcgtgtgacgcagctgaaaagcaacaacaaaagggtttggttgcaacagccagtgtgggtacctctggggagagaggacctcctctgacaaactggtctggtacccaccatgtgccaggatccaccctggcctctttttacccactgactccccagaacaacccttccaggcttctcttgtcatctttctctgcctgaggggaaactgaagctctgaaatgcgatgtgatctgtaccaggtcacccagctatgctgcaaagtgggttggccaaggccctttgcactgcatcaccctggtgcccagcaacatcaggtaaccttcactgagcaccaagcttatgccaggtctgtgctggccactctcatatacctcttcagatcctctgcttgtacccccagcccttgccttccctggattttgggcacccaggactttgctctgcctggtggagggtacttgatttctctgggcttccttcatctcaattctgacagtgtggaaggaaatctgtaggtacccaggtcctcagctccagactgggtgatgctggagacccaggagcaagtcagcacaggctctgcccacaggaggcatgcacaatctggtaggagaaacgcacaagtacagatagcttgctctctgagtgtgtctcattgattcattcagcctgtgtgtcctaaagcctcccttctcccatactgggtgatgctgggggcagagatgagtcaggcctaaggcttctctgggctgtgatggggatgtgcagggacagtgggatcccaggaaacagacctccatggtgggagatcaggagttaaggacttcctagagaaggtagtccctgaaggaaaagtaggaatctggcagtgaaagaggaaaagaacattccaggcagacagcactgcaagagggtgagctcttggtgtatttggagaccatccagttattcatctgactgcctacctgaggcaagcaccacacttaccactgtatgtgtactatgatcccaacaggcttgtgacatagatttcatattatccctgttgtatagatttttaaaactggtggctgggcgtggtggctcacgcctgtaatcccagcactttgggaggccgaggcgggcagatcacgaggtcaggagatcgagaccatcctggctaacacggtgaaaccccgtctctactaaaaatacaaaaaattagccaggagtggtggcgggcgcctgtggtggccagctactcaggaggctgaggcaggagaatggcgtgaacccgggaggcggagcttgcagtgagccgagatcgcgccactgcactccagcctgggcgacagagtgagactccctctcaaaagaaaataaaaataaaaataaactggccaggtgcggtggctcacgcttgcaatcccagtgctttgggagactgaggcaggaggatcacttaaggccaggagttcgagaccagcctgggcaacagcaagacctcatctctacaaaacttaaaagttagccaggcctggtggcacatgcctgtaatccgagtgctttgggaggctgaggcaggaggatcactcgagctcaagaattcaagacctgggcaagagagagagactttgtctctattaaaaataaaaatgattggccgagcatggtggtgcacaccagtattcccagctactctggaggctgaggcggaggcaggattgcttgatatgagggagattgaggctgcagtgagctgtgttcacaccactgcactccagtctgggcaacagtgcaagaccctgtcacttaaaaaaaaaaaaaaggaaaaaaaaactaaggacagagatttgcccaaggtttcacagctaggcagagatgtgagatttgagtacgggaggcccctgcggcccacatttgtaacccatactattctgagtgattaagacctgaaacttgtgcaggggtaggggatcagaggaagattcattctaactagaggaaaagtaaaccagtgtcagagctattgggatttgaaggggcttcgaaacatcaaaggtcttgagagcaggaagattcccacctttttcagaggttacctaggataatagtctttctctccattgattgattgattgattgagatggagtcttgctctgttgcccaggctggagcacagtggtgcagtctcagctcactgcaacctccaccttccaggctcaagcgattctcctgcctcagtctccctaatagctgggattacaggcccccaccactgcacccagctaatttttgtattttagtagagacagggttttgccacgttgaccaggctggtctcaatctcctgacctcaggtgatctgcccgccttggcctccctaagtgctaggattacacgtgtgtgccactgagcctggccataatagtctttatctccctaagcacatgcaggtgattcctgataggctcctcccaggcccctgcagcccagggtgctcaggcagggcaggcagaatgcagttggggatggaattgtccaggagggaggcctagactttggaaggccttgaaagctggctgagtagttccaggttgggggagggtcgtaactggtgttagatctgggctcaaagtggggtgagtgggaagctaaagatggtccagcagaagacagggctggacctgggaaggggtcatggggtggtagaagggtgagggacacctcactgacttcacggctgaccacgtgtgagtagcagggaggaaggcgtccccaggatcccaaggtctgcccctcgcccagaacagccatcctcccccttatccatcagcttgctctgtatgttcattcattgatactacaaaccaggcgaaatctgggtggtgttgagcaaggaaggggcagggtctgtcctatcccaggcagtgtaaagatgcccctggagtgggttgagcaaactggagagcccagaccccacaggaacagtcccttcactccatctgggacatttgaaactcctccctttttgttcaccggtggaatccagtagggggcatacccattgctcctccccaggcccccttccacctctggggtgtcctggccacactcactgctcggtgccatgtggaggagataacatttccttccgcccatgccccactatctggccccagcatgttttaagtgaggataaaagtcaagttctctgtccccaccttcacagggttgtcacttcccaacatccctaagaggtggaccaggtaggtgtcctgtttaagacttggaaatgaaggcttggaatcttctagggttccatctccagccatggccacccaacaaagagtctacaagcaggctaagttttggcctgagtgactcctcatcatctcatgtccccccagaccctagagcagcaggcagcttgggctaagacagacggcccattgttcaagtcctgactcttctgtcacttaagctccatggccttcccctctctgatccccagttggctcaccagttactgggaggttaatccctccctccctaagcagaagcagatgatttatgctgggtcatggagcaggctcctcctaggcctctacagcagataacccagatggagctcatcaccacacgtgcagagaaagccacggtgtgagaaggttgggcacctgagccagggccttcggacagccctctgcctgagatgcagctcactcccgtcccagaacagtccccccaccggaagcccccaccacctcagcggaaacaggcagccggacagaaagcaggttttcatgccaataatttattgaacggaggtctgtacacaggcaaaccttactgtggaaactaagacatcaggagctctctccactcccctggccctccagggtggggtgaggagggagtagaccttgggggcagaggacaggaggggagttacagctgtaggaggggcggggccaggttggacggtgcgaatcgacgttttctttaagaaaaaaattataacaatctatttacacccgggggccagggaagggaagaggagacgggctgggctggttctatttacaagggacacaggaggggagggggtctggaggaggtggaggtctgggggaggggagggggccaagggggtaggaggtcctcatccccccaacaccctgtccttctcttccctccccacaaccagttaaaatcctcttaaaaagcccaccacaggggtgaggctggtgagggagggactggaggtggggacagggactcatttacctctgccctctagtctaggggcccagccagggcaggagcttgatgggctatggccccccttcccagcccctcttggggctcccagatggaagtggaagggtgcttggtggggccctcaggaggagttagtgagggtaggtgtggcatcggtcgactgccagtctgagctggtcggagtctcagttaaagctggagggaggcagggaaggagcagagttagcctttgcctttcagacaccccttcgcccaacccaaaagtaggaattctcttgtcatagatgctacattaaaagttacaagctgttactttaggtgaagggttgcaaactcaagtgctaaagggccacgatagtaactgagtgacacaccagagtgccaggctccatataaggcggtggctgggctgggcacagtggctcacgcctgtaatcccagcactttgggaggctgaggtgggcagatcacaaggtcagcagttcgagaccagcctggccaacatggtgaaactccatgtctactcaaaatacaaaaataagccaggcatggtggtatgagcgtgtaatcccaggtacttaggaggctgaggcaggagaatcacttgaacccaggaggcagaagttggagtgagccgggattgtgccactgcactccagcctgggtgacagaaaaagactccgtctaaaaaatataaagggcgcccactgtctactgtcagtaggatgggcgggcccattgctgcccaatctgattttcttccccaagagaaacaggaaatctgaatttttacataaaatagccccatttttaaacgtggacaccatggccaggcacagcggttcacgcctgtaatcccaacactttaggaggccaagcgggaaaatcacctgaagttcaagaccagtctggccaacatggtgaaacctcatctctagtaaaaatacaaaaattagccaggcgtagtggtgtgtgtctgtaatcccagctactcggaggctgaggcaggagaattgcctgagcccaggaggcggagattgcagtgagccgagatcgagccactgcactgcagcctgggtggcgagtgaaactctattgcacaaaaaaaaaaaaaacaaacttgggcaacgaattcaactttttgtttgtgttcaggccagacgttatttctctggctttcccattggcattaaacacatttaaacatttgtacgcaagaataccctctaaaggtggtcattcacatgttgtaagatgtgtttcctatgccatcaaaatgtcgatgatttaaaaatacattcaggaaacccagtcactgagcgaacagccccaccctctccaggctgagagatactttaacccccagcagatggtccccacttaccttgtgaggacggggtgagggtggtagtgcccgctggggacctcaagtgaggagggatgagaatggcgttgagagacggttggatggagagttctagaaacaggaattgacatgctagtcagggtagactacagcagggttatgatgggcaccaaatgggaacccagctattgggaaggccagttgtttgtggacaccttcagccacagacctctctcaatgaaaaaccagaaaaagcttagcacaaggcagatcacagtaaagcacaactgaagcaggttcgattccccctgaatctgggagtcatctttcctgagccccaggcctgccttgtaccctgcccttagctccccactcctgcttcaacaccaagctcctcacaatctttggctgcccccctaccccgccccactccccagatcccaggctatgccctcaccaccagcactgaagttgaagagagggggaagtgggcggttgttaggcagctgggttcccagacatcgcagttcatcaaagaagctgtgcgcacaggcctctagtggggagagccttgaggatggggtgtactccagcaggctagagcagagcgcgatggcctctggcggcgttcgagatttgaacacctgagggatgggtgcagggctcatgagggtgagatgccctggacactggcatactcctgttatctcactgccacagtgcctgcggcaagttatgactggttgcttcccacacccccaccttccaaatgaagaaactaaggcccaaccactaaggagaggtcagtttgtatcgggtaagcaggcagcccaggtctgggactatatgagccctgctgaccctccataaaaattggaatcttgaatttacttgtgggttctcaacttttaaaatgccataaactttgaaagcggatggatgttattgatccctggataactcttcaaatcctcccaagccgtgattctgaggctaggtccacagaacagttgacctccaagggggaccagctctcagccatactgccctgagcccctagccctgccccacctttgtccaggggtgagctttaatctgagggaacttgaactccgtgtagttggggttcatctctcggatttgttcccgggttggtgttcccagcacctgtaaagagagggaggggtctgagacaagggccccatccctcagccccaccccctgcccagcccagccccgcccctcaccttgatgatctccaccagctggtccaccccactgtccccagggaagatgggctggcccaagaggagctctgccagtacacagccagctgaccaaacatctgaggggaaatggagggagcgtcagggctaggcgagtagggccaccaacctcccaatgcttttattcctcatggccatcctaagagtgtcaggagccccgttttctcaaagacaaagcacctggcccaaggtcacatgcagcttagaaacatgggcccgaccttgaccctgcctttgctgtactctctagtctaggtgtgtttccagccctcagttcctctctctgctaaggaccccaatgagctccttctctcccgctagccttggacgacagaccaaattaggcccaaacctgccaacaggcacccatgttctttgggccacaggaaggtacagccttaaatcctggactgccttcctcttgttccagcctctctcctgcccatgagaagagctgcagcgtggcagtctcacccctccctgctttgtaccttgacccccacagcacgagttcatacctaaggactccacagttcgtcatgctgctgtggaaggtgccctttcaaactctcatgcccattccctcaattcagacttcccctcatgcctggaaaatggcagttgtccccacaaacagggaaggacacagaggccctgggagcaagttgcaccttcatggtggcaaagccttgcttcccggttcccccaaggtctccagcagcccttccccctagctgagaacagagggctgacagggaggttccagagctggtatggactctggagtcaggtcagctttcaaatcccagtcctgcccagtcctagtggtgccagtgcgggcaggcggcctcacagctctaagctcatctgtaaaattagcattcaacagcatcagcctcctaagtttgtgaggactggatacaagaacagaagttaagctttcatcaccaagcttggcatacagcacacagaaaactccaaaacttcccagattgccactccccccgccaccctcccataactctgaccgatggatgaggtgtaatcagtggctccaaagatgagctctggggcccggtagtagcgagaacagatgtaggagacattgggctcccctcggaccaactgctttgcactgtgggaagagatgggcaggggtacacgtgaggcaagggttggggtcccccctgcctcttcagccacccaacatgccccaggcccacctgccaaaatcgcagagcttgaggacagcagtgtcagggtccaccagcaggttctggggcttgatgtcgcggtgacacacgccctgggagtggatgtaggccaagctgcggaagagctggtacatgtacacctgcggcgggcacaggatagcagaactttagcccagctttccccatacagcaccactaccccaccagcttggcctgaagagcccttccaggcccactctccctgctgcccccacagctttggggaaacccatttgaaaccttggttctcttaatgtgcaccacaatcacttgaaggacttgttaaaacagggactactggctgggcgtggcgggtcacgcctgtaatcccggtattttgggaggccaagaccagcctcgccaacatgttgagatcccgtctctactaaaaatacaaaaattagccgggcgtggtggtgcacacctgtaatcccagctactcgggaggctgaggcagaagaatcacttgaactcaggaggcggaggttgcagtgagccgagatcgcaccactgcactccagcgtgggtgacagagaccctgtctcaaaaaaaacaaaaaaaaagggactgctgggccccactcttagagtttctgatcagtgagttctgaatgaggcatttgcaacaagctctccagcactgatgctggtccccggaccacactctgagaaccactgctttaatcacaacccttggcagaagcctgatgagtaaggtacatcgggaggttgtcataaaacaggctagggagccaggcactcagcttccccctcaccaaaaccactggctccttaatccgacaatcaaaaccacccctgagcctgccccctctccagctccattttcctgccactctccctcccactgactagaacagaagtaccgtgagagcaggattttgagtttcagttactgctgcatcccccagggcctagacagaccaggtcctgacatggctgcttcctaggcccccttccttttattccagttcccctcggccaaagatgccacttccttgccctgtgcttggtctcctccaggaagccttccttgatccttctcacccacaaaccaggctgggtgcttcctccatttccagaattccctgtgctccttctggtatggcagcagctagttcatttaatagttttctgtgatgacgcctttctaccctaccaaactgagagctcttcaaggccaaggcctgggtcgcagtcagtggtgcctctggaattcctcagccctgggacccgtatgcaggcagccacaggacagattcgccaaaccagagagctcccctcctgggaagtgaggtccaacagccacaaccactggtagagcccacgtcggctcacccgtgcttggtacgtaaagccagcaggagcagcagctgggccccaagtgaccttcagcaaacaaacccacccacctccttccaatgcagtaggctgctccagcctgttcgccacatcatccctgggctgcaatcattcattcattcattcaaacacctcctgaaggtctgtaacacccagggcacgatgccaggcactggggaatgagcctgcacagatgatggacggagatgcattcctggctctgtggatgctaaccttcctccagccctaactccttcccacctacccccagccaaggctctaaaggcccgaactctggcctcagcagctgtctctgtgcagtcctggtccccaccacccccttatcctgagctaactccaacatctctggtgccactggactccctgtatggacctgagcaactacctggcagcttctgcaaccccaggtgtcaggctgccttcctgattcagtcaggccttgcctgccttggccctcccctgtgttaggcgagctccatctcggggggttatgggaacaacagcaggggacatggggcctccaaaaaccaacataaacttggcggatgagggatcccataaaaggcaggaggctccagagcccctggctttgtgggcctgggtcccagcagcccacctgctggcctaccttgacatagaggatagggatggtcaacttggccttggtgaagtggcgggccacccggtacactgtctcgggcacatattccagcaccagatttaggtaaagctcgtctttctgcagggagcaaaggagaggtgtgaggcactgtgagaagagtgaggagggggaaggaaggtatgcagggagcagtgggggaaaggcaggcaggcaggaaaatggctggagcaacccaccaccaccacctcgagatctcaccttctcgccactggagtagaaaaagtatctcagcctcacaatattgcagtggtccagcttacgcatgatctgcagctctcggttcttgagggcaaagggagagtctcagaatacaaccaactctctcggctgctcctccctactcacactcactcccaacaacagccaggcagctactccctgtgtcccagctccaaggtcccctggagtatcccccaattccttgtctccagactattcccctcccacaggagctggaagcccacaggttaaacccaggccacagatgtgttttcttcaccccatttttttttttttttgagacagagtcttgctctgttgccaggctggcatgcagtggctcaatatcggctcactgcaacctctgcctccctgggtcaagcaattctcctgcctcagccttccaagtagctgggattacaggcatgcaccaccacgcccagctaatttttgtatttttagtagagatggggtttcaccacgttagccaggatggtctcgatctcctgaccttgtgatccacctgcctcagcctccctgacctcatgatccacaggcctcagcctcccaaagtgctgggattacaggcgtgaggcaccgcgcccagccaccccacttaaaaaaaaattttttttcaacttattgctgacatgtaaaagccaaatggcaccttctgatttttttctccaaaataaagttttaaaaaggataggccagggccaggcgtggtggctcacgcctgtaatcccagcactttgggaggctgaggtgggtggatcacgaagtcaggagattgagaccatcctggttaacacggtgaaaccctgtctctactaaaaatacaaaaaaaattagccaagcatggtggcaggcacctgtagtcccagctactcgggaggctgaggcaggagaatggcgtgaacccaggaggcggagcttgcagtgagctgagatcgcgccactgcactccagcctgggcgacagactctgtctcaaaaaataataataataaataaataaataagataaaatttattattattattatttttaaaagaacctggctatgttggccaggttggttttgaactcctagtctcaggcaatcctcctgcctcgggctctccaagttcaaggattacaggcatgagctaccatacccagccttaaaataaaaataaaataaaaaacagctgggcatggtggctcacccctgtaatcccagcactttgggaggccaaggcagggaaatcacttgaggccaggagttcgagaccagcctggccaacgtggcaaaaccccatctctactaaaaatacaaaaaaattagctgggcatggtggcgcacgcctgtgattccaactactcaggtggatgaggtacaagaattgcttgaacccaggaggcagaggttgcagcgcttgaacccaggaggcagaggttgcagtgagccgacatcacaccactgcactccagccttagtgacagaacgagattctgtcttaaaaaaaaaaaaaaaaaaatagagaccatcctggctaactcggtgaaaccccgtccctactagaaatacaaaaaattagccgagagtggtggcacacgcctgtagtcccagctactagggaggctgaggcagaagaatcgcttgaacccggcaggcggaggttgcagtgacccgagatcacgccaccacactccagcctgggtgacagcatgagactccgtctcaaaaaaaaaaaaaaaaaaaaaaaaaagatttcacatctaaatccagttttcagtttgtcttgaaaaatcagggctaggtatgctggctcatgcctgtaataccagcactttgggaggtcgaggtgggggcggattacttgaggtcaggagttcgagaccagcctggccaacatggcaaaaccctgtctctactaaaaatacaaaaaaaaaaaattagccaggcatagtggcccatgcctgcaatcccagctactcaggtggttgaggcacaagaatcgcttgaacctgggaggcagaggttgtagcgggccaagatcgtgccactgcactccagcctgggtgacagagtaagactccatctcaaaaaaaaaaaatcaggcatgggcacatgaggcttgcccccctacctggcacaagcaacaacagacaggtagtggccatccagctcactctggtcccgtggaagcatctgggtcctcgaactctatctaggatcctgagtcccagactccaggcattggacttttcccagaatgcggtctcagcattcttccccattctctattcctcagtgaggcctaggaactccctgcccctacatccctcttacttctggaactcaactccaatcaaattctgacaccctggagctcctcctgcccaagggccctccctgccaagaccgaggccctggtctggttcctttccagtctaggctcagttctcctacatccagactagtctaagctccaaatgccaggcccttaaacaccaattattcctcaacttccacttcctccatctccttctagttccctgagcctctcctagctcacagggcacctccattccattctgcgctggccaaacacctgggaagagcgcgaccttcagaaccacccgcgctagccctgccaggtccctttctctcctgggaagaagtgtaaccaaatggttaaggtagagggtttgggaatcagattccagccttgactggggcacttgctctatgacctcaggcaatcctcttacctgagtttgtttccctgcttttaaacttagcttacacttagaatgggtataaccacagtacctaccctcagagaatctttatgtaaattaaacaagaatttgcttattaagcacttacattgagcaaatgcccagtaaaagctctgggctctcctgggatccacatttcccatctttcacaggtctcatttcctcttttcccccttctcttctggcccatggctctgaaacccaagcctccagctctctggctcaggttctcccaccagtcacacccagtccccaaacctccctgtccccatcccgcccaagctaccttgaacctcttgtcctggagaaccttcttgatggcgactagttccctggtctctgccagccgtgcctggtacacgaccccaaatgagccattgccaatcactttgatgtccgtgtaagccacttcttgggagcgctctgggccttggcctagagtggctacgactgtggtcaccttcccgctgtcacctggggaacaaaggggatacacgatccactgacccatcctgcctgcgcatcaccctatcctggggctgtgggaggaagggaaatctctgcaggaagctcgttggggacctctttgtcccctcctcctctttgaggaaaggtggatgctgggaccttcccagtgacttttcccctcttcctttctgggaatcttaagtcctgctcccctccacataggaggatattgatacctaaatctctctgcttcaagggttggcaaccccaaatttctacttctaggaagcaacagatcactggtccatcttggtactgggagacatcagatgttgactccatctactctggatctactgccctctggcccctcctatttggagaaagcttgaccgagcctcttccacttcagggagcagtaaccctgaggtactcctactttaggaaagcactaacctctctcacagcctagaggatactgacctctaagtcctcccctgtagagctggtaactttactggttcttggtgacagaaatgaatgtcctctcctgctataagtgccagtgccctgaccctcactttttggtactttgaggttagaaaaaaacactgacctgacctcttcatctgagtggtccagagacccagacccctcactatatgtgggtggtccctaatggacaagcaccaaattatgataatgatgaacctgacctttattatcaaggagctattccagcctcagtcctttgaaggaaagctataattcccaattcccattattcaaatggtggcaaaccttggtgccattcttagaggatagtgacccctttgagtaactgatgaaccaaatccatttttttgtttttttttttgagacacagtttcgctctcgttgcccagctggagtgcagtggcacgatctcgactcactgcaacctccgcctgctgggttcaagcgattctcctgcctcagcctcccgagaagctgggattacaggcgcccgccaccacgcccagctaattttttatatttttagtagagacagggttccaccagttggccaggctggtctcgaactcctgaccgcaggtgatccgcccacctcagcctcccaaagtgctgggattacaggcgtgagccaccgcgcccggccaccaaatccattttgaggggccagtgacaagttctttcagagggagataaccctacatcacttttttttttcagagccaatgacaccataccttagaacaattattaaaaaagtataaccttagatccatattctgtaggaaactgtgacctaccctgctccattccatttttgttaaaggagacacaccaagccatgtattttaaaacatggactatggacttggtttgaaggatatgctgactcccaatgtctttatatctaaaaggcagtaactattaattctcaccattggcagtacagctcaacaagatttagggtgggtaatgatgccaggtcttggttttaatagggaagatgatctgagtaccaggtttggaaagcctggccctattctttggggacaaaacacagtaacctcaaagccctgcttctaagtgatattcgctccaaatccccatcttctgaaggacagggaatgcagatccctctttttcggggttggtcttattcttgttctcttaggagacaataaccctagatccccatttgcaagcgactgtgacctctgatccaatattataatgaatagcaacatcagatacctgttcttaaggctcaaggacccaagacctcaataatggaagaacagagacttgtaacccgtttctttaagtgttagtaattctgatccacgagtaattctgatctccaagagatggtaaccccaagactccttttcctgggaggaagagggctcggatccccggtatggggaggcacagtgacctcgagctcctatctaagcacatgaaagaatctgatggatgtctgaggagctttgggaaccctaatcaccaccctacacgggcgccactagtactcacggcccagcttcaccccgggcggcgggaagctagtgcctgcgccggggcctccgctgcctcctccgccgctgccgccgggtccacccccggagctcgaggccccgacgcccccacccatggccccgacagatgcctttccgccgccggtgccgcctgggccggaggccgagcctccggggccgccgccgcctcctccgcctccgccgccgggctccgcgaacgagctagtccgcgccctgcccgagcccccagggccgcctcccgaaggcccgccgccgctcatggcgccgagcacaggcccaggctgcggggctcgggctgcccgggctgccccagccgccgccgctgccgccgcctcccccgggccctggcctcttccaggccgcgccgctctggcttgggctccggctccggcccagcgcccgccgcggggcacgccgggagatgcagtccggctgtcgtccgcgccgccgtcaccgccctcggcccgcacagagagccgcgtggcacgccgggaaatgaagtccacaaaagcctcagagtagaccgcgggaatgatgggcgggaatgacgggtcacgctgtacgtcgggaaatggagtccagggtaatctgtcagccgactgtacgacggggagccctgaagcactttaggaagcagagagcctgatgcacgctgggaaacggagtccactcactcagtctattagctgtgtatgcctcccagagctcggtgcgctctgggaaattgagtcggcccgcgtgaacctgcgggtctcgggccgtgaggcaagccgggaaatggagtcgtcgccacgccctcaccgcattgcaggtgtaaagcgatttttaaagcacgccgggaaatggagtctcaggtggtttttaagccccaggtggatactgcagttccggagatgggcgaggaaatggagtaggtttacgcgctcctctttccaggtacgctgggccgcagtccctgccgggaagtgtagtcagcaccaaggcctcagtgcagttgccacagcgagccctggtgtgttctgggaaatggagttcgacgtatcctccccattgactgagggggcgggatcgcccatgagctccaagcatgctggggaatagtccagacctgaccctctgtgaggccagtctgcggaggcttgccgggaagcgaagtccaatggccaccatcaggggcgtgtgaacgaaaggttagagactgcggcagttccctggagagacttaaaagtgtttcagcgcctccttcctcgcccccaggtccttctttaagaaagagccgaggtcgatcaaggactgctggaaaatggatccaagcacctttaagttccaggtgaccatagatcaggaaagaaaaaatgtcccctctctaaccgcaactctgcaaagattcgggaaacaaagttcccggcggtttctcagaacactaactagtcttcggatacagtctagcttttcctagcaatgtggttcgcaccaggaagctgaatggagcattaaaaagacggaaatgtcatttctgggcctggcgctgtggctcaggctgggcgccagtagctcacgcctgtaatcctagcactttgggaggccgaggctggcggatcatccgaggtcaggagttcgagaccagcctggccaacatagcgaaacccccgtctctactaaaagtacaaaaattagccgggtgtggtggcgggcgcctgtaataccagctactcaggaggctgaagcaggagaatcgcttgaacccgggaggcataggttgcagtgagccgagatcgcgccactgcactccagtctgggcgaaaagagtgagactccgtctcaaaaaaaaaaaaatcctgtcttgaaccaccattcagttttcagtttttggtttgttttgagacagggtctcgctctgccgcccaggctggcgggcagtggcgcaatcacaggtcactgcagcctctaactcccaggctcaagcaatccccccacctaagcctcccatgtaggtgggactacaggcgtgcaccatcacgcccagctaatttggtttggtttgttttttggggtggtggggggtagcggggtgggcttcgccatgttgcccaggctggtctccaattcctgggctcaagcgattctacctcagcctccaacgtgctggtatttcaggcttgagccacggcaccgggcctcccactcttgtgttttgcatcctccgcttcctaaattacaagatcccggaaagccaaaaataaggaagccagctgcctcaggttttgtgtactcagtgagtcgtcctatttatcgattaatacccgaaggagagtagcccccaaaaggcgctgggaaacagagttcctgtgtctgtatgtgtctcttcctcccccggaaatacttagaagtagaatgaaagcgttctcagcccctcccgcatcctggaatggtgggaaatggagtctctggacttcacgttaatccgagcttgtgcttatactaactgtcctgtcctttctgaaaccagaagaaagtcctgtccactcagtttgttcctgactgcaattccccgcggacacaactgcgggggtcggtagcgccaaagcctgttgagactacattacccagaaggcaaagtgcggaacacttccgctcccttcacaaagcaggtggccgcaccacgcgcggctaggcgcgggcgtttctgggagttgcagtttcccagccaaatggtacctgctgccctctgatggcagctctgagtcaaaaagtaaaaatttcagtcgagccccttggcctagggattccaacgcgggaccaagacggctcaaaagggcggcgacatggggcaggatagcgagggttatttaaccgccagaacccgtggggcatgcgccgctgcgtgtgggcaaccgccacgaggggattggggtccgtgggagtttgaaggtgacggtctgcaatctatcaggatgtttgtagaggatgagaatgttcatagagggatgctaggaagggttgtaaacgtctgagagaggcctatgggtgtctagaagggctaagaggagtccgtggagtggtgaaggggtctttgatgagcttagttgacaggataattactggggaccagtggagaagcctgaggggacttaggctgtctgctaaaagttctatgggtgggtggacgcgatggcttacacttgcaatcccagcactttgtgaggtcaaggccgtggatcacttgaggtcagtcagaagttcgagacccgcctggccaacatggaggaaaccccatctctactaaaaacacacaaaaaaattagccgggcgtggtggcccacgcctgtaatcccagctactcgggaagctgaggcacaagaatctcttgaacctgggaggctgaggttgcagtgggctgagattgcaccactgcactccaccctgggcaacagagtgagactctgttttgaaaaaaaagaaaaaaaaaaaaggtctatgggagacagaaattactggtgaccaaggggatctctgagcgacctgaaggggtgagggatggttgagaagcattgggaaggggctttgagagtctgtggaggtactggggctacacgtacaaagcagggaggtctctgatgagattaattaatatgtgaagtgccttgagagcatctgtaaagggctttctacttggaagcaaggatctcagaggatatggatgggaccaagggtgtcttcttgcaggaacatttcaagccagctagctaatagatttaggtgggcgattaaaggttagagtagccgctggagttttcaaggccaaatgccacctgtgacatcctacacagccagaatctggggcaacttgtctggtagggctgtggtctgacctggacagcagttagggagctgagctgagcacttatgattccatattagatgtggttagaggtgctttgaaggcactgggttcaggggctgaggccagtagttagggtcctctcctcccgagtgacaacatccccttctccatcaccccaccaccaccaccaactcagctgcaactatgttgccaggagacatgtctcatcccagcttccagaaatagcccagtggcccccaccccagggaatgacttacatcacccaggagagggagcagtttcccgcaggccgcctcgggagcctcggtttcctgccagtatcctagccctggatcctctcttccctgccaaccgacatcatctgggaccacccaccctggctggcatgaaatgagatgcgagtgggtagcagttgccagtcaacgtttcttccccctcagggttgcacagggtggagtttcatggcgaagccagtccaacaagccctcaattgccactccatctcttagcagctgtgtggccttggggaaaccccttcccctttctgggcctcaggcacctcacctgcatggtggagacagaacttgtctctaagggtacttccagcctggattattcctcctaattctttcatccctgattcaagctctccaatctcagcttctagctctatgagctcatctcaaatcctctgatcctgaaagcctgatctggatccaactatcttggtgttaggaaggaaaagtcaggagttgttgaaagaacgtgggctttgaagtcctggctcagccacagggccctgggcaagtcacttagcagcactggttgcccctaccttactggatactgaaggagctacaacactgcagctcttaagtattggacacacagtaggtcaacagcatcgatgactagtgagccagtcccttggctgtgtgctggctgggggtgttcccatacctggacctgaagatcaccaagttaccttgcaaggtctacatttcaagagacaccacaggctgttctccaaaggactcccagctgaactcagagcaacaagagaggggtgtgggcagggtgcgaggggcagtgcaaaagggagctcctggtcttcactggggacctggggtgtgggaagaattcctagccacaagtgggaaggcatccaggcaatcagaagagcaagggcagtggggttgtggtgaaaaacagtgggaagagctttcaaggacaaggtccccatggaacagaggagcagtctgatgaagccggcgcatgcctgagaccactatcatcaagctctggggctcatgtgcctctgaggtcaggagacggtttcccaggcctggatttggcccattctgattagggttaggccctctatactgatctggccacagacccactagcagccagggtggggcccctccttcagaatcaagcaaaagctgtggccctcagggggctgcaccgagcacctaggacattgatcactgcatccaaaggtccaaagttttattgttttgaatacattctccagcggcccctctactccccccaccctcagtccccaatacagaataaggcttgaccacagccccccaccccaccccagaggccccagctgggaggcagagggggcttccagtttggtttcagggcacccccttcccatccccccacccgcctgcccatgggccagtcctaggagcagctggggatgaaggggttggaccggtgctggggtggggagtgggagagggatagcaggcacttgtagagatttgtggcccatgggcggcacccctcaccctcctccgccccccaccccccaacacatggaatttttggttcattataaaattgtccctccctcccctgctgtgaccttgtggggtatgagaaacctaggcactcatggccccctggaggggcagggcaggcagggctggggctgaggagggctgggagtggggcagagcgggtgggtcagaggggtacaagaggcagagaacagggagggagacaaggctttacttcctaagcgattgtaatagaaaagttcctgggtgttaaggccaaagcctcaattcaaatataaattccccagaatggaggtgacccccttaacttccccctccctccccctaccaccactttgcccagagcttagaaacccacagagacagggaatagcccctagccctgggcacccacccacccccaccatttttaaaaaaaagaaattaaagttttatacaaaatgtggggagggaaaagggaggaggcagggaagagacaagagagctgccctcacctccagggcatagggggcttaaggcagcaaaagaagcatggggggtgcggggcacacaggtcccctgcccacagccctcaggagtctcggtgctccagggagagctgggccgtggcatgctggaggtcagagctcacccgccttggggtgaggggccccccagcctccccaggcccctccccacgcaccttcttgtcctcaccctcatcctcaaagcccccagcggggcccccacccccttcgaggcgacagtcttcactccagcgccgcttaaagcgtagcttgaggggcatgcactgggatgccccgggtgcctcgccgggctcaggcttagggggtgcaggtggggcacggggcgtcttgaacacctccccgtcttcctcatcctcatcactgatgtcagtcacctctacctcctccgactcgccttccgagatgggctccaccttgatctgtggtggcgggggcggtggggctagcgcccctgccccctcagccagcccgcctgcactgccaccgctcttgtcagcaccggctacggccttctccccagctgcccgctgccggcgtccgagtgggggcggctggagcttaaacttgaatggggaggaagaagaagaagaggatgacgaggccgaggaggggaccggtggggtctcgggtgccatgggcggcagcgggcacttgtcagggcgctggggctggggcaccaccagcccagggtagtgcaggaaggcgcgggggctgaggtggtagttgtagacgctttgggtgtgggcctgcaggtaccgtttcatgtcctcagggctgaaggagaagtgggagcctccccctgagccgctgggccccccgccaccactggggtacatcgggctcagcgtgggcgagggagtgtaggccaggtgggtgggcgtcatgggcagagccggggagagctgagggggcagcagggatccaggaccggccagaggcgacacagggaaggggctgaggggttcagggccaccccgaggccggggatagactcggaagacaccagggtcatggggcaggcgggccagcgggggccctcggaaggcacccagatccggagggccgggtggtcgggcgcggggatcctctcccagcggttcctccagctctgacgtgccatcactacagtcactgactgagcctcggcccaggcggcgggccaccacagccgagaagagggaagatgaagatgaagagcaggctggtggtgagcgggggtcctcggtgggggacagcacctcggagggcgttgagggagggaagcggaagtggctaccacccgacggcactggcggggcactctggggcactgcaccccctggcagaagggagacagtgtcaaggcccctggcctagcctgaaggggcatgtagaccctctccacaccaaccatccctggtactcaccagccaaccccacatcaatgaatgggtaattgaccagcaccagtttgttgaaattgaacttgtaggtgaaccgtttccccttggtcttgtgcagaatgcgcttgttatagtaatagctgtgggtacagaaatgccattgggaaggtcaggtacgtgggacccaggtctagactccacaccttaacacgcacttaggtgtggttcccaaaggccaactgaggaacgtaggccacaaaagacaaatcaagtgcccagagggtgggtaccagctctctcctcacatctaaggcaggactagaggatccactggtgactgtaatctctcctcaggatacgtctgtgttaccaaggggctcagggaagggctgggagtggcccaaggtcacacagctaggatttggcaaagccaggggtcagacccaatgcttgttcccacaggcaaggggctgtgcaaccccgggggggcactccacatgtgctcaggggtccccagcccgtcctcaccgcagggcccggctcagcttgtcgtaattcatctggggcttgcacttgcgaacgccccacagccgggccacctcatcagggtctttgatgacgaattccccgtagtccccctgccaggcaatgacgccctggtactcctccttccgcagcagctccaggataaagtgccacagctggatctgccttgagccaggggacgactctggcttgtaggcccaatccgggaaggcaaaccctggggacgggaggcagggagtggcctggggtcaggctgccaagtccagggctctgggtcccatcccagggtccacctctgccctgccttcaacatggggaaatctgtctcacctcagccaagtcaagatctgatttaagagaagacagtgcgtgtctgtctgtctgcatgtgaggggctagacaggagctgggggggaggggaagctggagcccgctccagcgacaccgggagaaacaggaaaccgtcggcggtgggtcccggggccagtgccagggggccaggcaccaagccaggctggcgggcagggctgccagtgggggaggggcaggaaggggcacacgtggccagccgggttggggtacagccccccagcttacccccactcccattcagagccagttgcaccaccccagctcctcggatgtcctccttagaaacatgcactgtctcctccgaagacccaacagagcccctactcccaaccccaagacctgagaggaagattttttttttttttcttaaaaggaccaggaggggtggggtgactcggttgccgatgaggtcagcgcttgcacacacagaggcttctgtcttccctggagagtgaaacccagactgtctgagaggccccccaagccctggaccctctgagctacactgccctccccagacccaggcatccaggccccacctggctggagggcccagcccaggcctggagcttgagcaggcaccctggagctgtcaccctcttcccacttctgccttctcatcttcagctccttccctgcccacctgcctgcccacccccagcattaaccttgggtagaggttggcggtgggctggctggtctctggagggggtgggcagcctggggtggggggtggggggtggggggactgcggttgttgtcatttcccaacaacaggggccatcaataattcagcaccaggcagccggtaatggaggggtgggaggagggaaaggggaggaagggaaggagtggggaggcagagcagggtccctggtgccactagagagagaaggccaaggtggccagctaaagatgggcggctcccaaatccagtcaggctgcaggggtcaatccgcctcccttggccccagctcaaacaggtaccaacaaggcctccaggcaacacatccaccctcaaagactccacccaagtctggaatccaacaagggatccttccccttgggaatccagggaatcagtagttcctgctcccacagggaccaccccctccaaatccagagctcactgtaggcccccaactcctgcccagactgggctgcagtaccacatagcccccggagtccctgccccattcagatatatcccagccttccaccagcccctcagggtgccagggatatgacctccagctgttcacagaccagcaccaacagcccctgttccatttaaaagtgacagcctttgacaaccccttccagagaccccagagcaccatcgctctcttgggaatctaggtgttcaacccattatcctcacccttctagagaatccagatcacaaggtctcctgcaaggcccagggtcctttggaacccaggtgacccagccaccagcttcatggaccctcatatcccctccaaaaagctcccagcccctctcagggaaccaagctccatgttacttccacctcagccccaatctggctctagacctagaaggggggccaaagcccctgagacatcaatctgggggtgggggatgtactgacttccaccctccccccaaaattaaagccacccttcccagcccacccgccccagcctccgtgtcccggtaaccaggcaacgtgtgtgcagcgacagtcctgggagcgggggagcaggaggctaaaaataaactttgcagaagagagggagtgagagagactacatgcaacacaaagggaactcggaaaggaggtgggggggctctggaaaggcctcaagccgcattctgggagctgtcccaggcccccttgttaaaccccttccctgagcaacccctcctccagggcctggaccctggctcccacttctggcagggacccttccccactcccaagcccaccacaacggcggctttcctcatcggacacagcatacatgaaggcctgttcccggctttgggggggggagaatgaagagggggtgacgtcagggtgtctcaatggggctctgttccccaggccttggagccaggagccaggcacgggcaaggggagcatgtgtgagtgtgctgtgtatgcgtccacgtgcttaaaacagggaaacaccagacctgcacggaggaagcttgggggtgcgggacctcgggaacatgggggccagtgaggcagggagagagcaggcacatggagagaggggttcaggagactgcgagacagagtgcagaagtggcagcagtcagacagcaagggctgggatggcgaggtcccagaagcacacctgggtcccacagaggcggggtagggattctcccagacagactatgcaagcctggggggacaaaactcctgggcaccccccaacctcacgtgacggcccaaactttttttaagggactatgagggtcggaagggaggagtggtggcagaggaagaacacgccggcctcctggggggccccaccacctcccccactccaggcggccctctatggcgccagagccgggaagaaaacaggaagtgggaaacagccacggcagagagagggaccgggatggagaactggatggaggggtgcggagcggcaggccaggaggcagacgggaaagatgcaccgatcggaggccattccaggcctccttcccctcccctcccccagccggaaaacccacacactgtcccgccccccgacagggttggggaagcgacccgcggatcctatcaggccaaggccggtagcagggagagaagatgaagcgaggttgtctgggtgcctcggcctcctccttgggcgagggtaggctcctgctgcccccagggcccagccacccgggagcgagtggaagccgggggagtgtgtaggacgcacgtgactgaccctaccgcactccgcaccccggccccacccccagggcccctcctcggtccgggtcccaatcccctggcgccggatcccagctcggagccctttaagattaagccgcccccacccgccgagcagggggatggggatgggaatggggtgggaatggggtggggatggggtggggtgggtgggccggtcggggcacacacccgcacacaggagcccgagccgccgccgccgccgccgccgccgccgggggaaggaaacaagtttgaacagcggcgcccggcccccttccccctcccccgtccccgccccgggccggattccgacggggtagacgggcagggggcggctgggacccctccccctgcgcgctcgggcgcaaagtccagcccgcgcgagcccgggggcggcgggggaggggagggggaaaagtccgagtgggagggggagttaatcccgctgccccccgcccgccgaccgagggggaggggaaccttggccccttaaggaggagcaagttggcggggaagagaggggcggagggaagagacggcccgctgaaagagaagaggtggatccgggagggggggcgaggggggagcctctgcgtctccccccaccttccccaccctcctcaaccccgggccaccggtggcgcgggaggagggtacccaggtctccccggagccaccttaaagccgcgcgttctaaggtcggaaacaaaaagttcctttttcgaacgttcgggctgcgctttggaactttgcgactcggcgagggcgggggagcgaggagccgacagaggcgggcgggggaggggcggcgcagccaggaccccgagtcccgggctccccactcacgccctcctcctagaggccatcccgtatcccccgctaacctggtgcagggcacgcgccgccgtgaaggtcaccagcaggaccgcgcagcgcagaaccagggatagcgggcccggtggacgagcccccccgccccgcacacgtcccggcccccagagtgcaacgtgacaagagcggaggggaaggaccccgccacccccgtgatcccgggagtgggggagagcccggcctgcggggtcccggtagggatacaggaccaagacccgcagcacccacaccactccgcccggagccaggaatcgggggtcccaggcagcaaccccgctcgcgccacgagaagcaacaggtctccagtgcttgaggggtcccccagaactggggatcactcgggctcccccggaccccttcagcccccccaaagtttctccgttcggtttcccggggcaacaagtctcccccacacgtgctgcccccgcccccacctgtgtccgccggggtcttcatgctggggggcccggggcgaagcgccccgattccgggccgcggctcccggcgccctcgctgccccgtcccgtcccgcgcccgtcgggccgccctcgccgcctcacccggcctcgcctctcagagcctctcccctccccgccgccgcctcccgggttaatatcgcactccggggccgggacgcccacgccccccggccggcgacgtcaccgccgcgtcgccatggagacactgcgcccgccccctccccgcgcactcacacacacgctcgtcggcgcgcagccactgaggaccggccggctctgggcttaaaggggccgcgcggcgggggagggaggaaggagggggtgggggtgggatggggtcccgcgggtcatgaccctagtcagaggctccgagtctgcagctaacttaagtcttcggcactcgctacctgctgcccctcctcctctcctgcccactgcgggctccagagtttcttttgggagcctgtatgggaaaacggggggcccttccgaggaagcgggggtcagaaacttttgtggggagggggcagaatcttctctgcagaggggcggggtcaggaccttagaagatgatgaagaccacagcatttcccagcttggttttacccaaccccccaaccctgagcctgaatgggggcagctgtccaggggtggggtggaatgggtgggatgcatttcccagcatcggaaatggggaggcggctgtgccctccgctcctgtggggatggggtcttggcttccctgataacccccgtccagctggggaggaagtgaccagagagaatgcatttggaagcccccaccaccaccgtccccaggctgcagctgtcccggggatagggctggcgccggaggtccccccacgtccactactaggaccgggggttccggaggcggggccgggatacgagggggcgaccaaagtctgaacaaatgtgctcccaaggggcactgagggtcgccaggagagaggaagacagggcttaagatcgaaagccagagcgtagagaagtgttaagtctccgttctctgcctcagccgggagggaaggatgaagcctgaggctctgggaaacaggaaatcacagcgcagatctgatggagcccaggagccggcagcagggtagaggccaaatagaagcaatattcacaggcatagcctggaaacagagtctcaaaaaagactctgaggttccgaaggaggggcgtatgggtggcgggcgggagttgggggggctgggtgggggacgaatccagaagatgggcggggagacagaaaagtcacagatagggaaggcctgcggagctcaggctcccggtacccagggcttcaatcccagcctcctcgcttgcggggtacctagtccaccttagacaggctcctcaccagtgcctaaaaaaaaaagtctcaggcctcctccttggggagaccaagggctccagggaagctttcccccacaacccccgggaattatgtaaccttgcctacggacagtacagctcccccacggatattgtaaccctctgggagcggtgtggtccagcaataataatcatcttcattgttcgaataacagctcccgaattccgagtgttcatgatgtgccaggcaccgggccaagcattgtcaggggcatcttctcatttaatcctcacaaaatcccaacgaggggaattactgctgttatccccatttacagataaagaaagtgatgctctctgagggaaaatcagtccactaaatcttacagccaggaagtattggaactaagattcgaacccagatctaaccaattccaaaccaccacatttaccctttaccattatgctttattacctcttttactaccccctccaaaaaaaaaaaaatgcagattttcaaagatactacatcagggcccggcgcagtggcgcacgcctgtaaacctagcactttgggagccgaggcgggagatcacttcaggtcagaagttccagaccagcctggccaacatggtgaaaccccatctctactaaaagtacagaaatttgccaggcgtggtggcgcacctgtaatcccggctactcaggaggctgaggcaggagaatcgcttgaacccaggaggatcgcttgaatccaggaggcggaggctgtagtgagccgagatcgctccgctgcactccaccctgggtaacagcaaaactccgtctaaaaataaataaataaaaaggctgggcgcggtagctcacgcctgtaatcccagcactttgggaggccgaggcaggtggatcacctgaggtctgtagttcgagaccagcctgaccaacatggagaaaccccgtccctactaaaaatacaaaaaattagccgggcttggtggtgcatgtctgtaatcccagctgctcgggaggctaaggtagaatcgcttgaacccgggagggggttggttgcggtgagctgagatcgcgccattgcactccagcctgggcaacaagagcgaaactcagtttcaaaacaaacaaacaaacaaaaagataacacatcagtaacaaacccagtgacccctaccctcccaccagcaagacagagatgagttacacccaaccttttttttttttttttgagacggagtctcactctgtcgtccagggtggagtgcagtggccccatctcggctcactgcaagctccgcctcccgggttcacgccattctcctgcctcagcctactgagtagctgggactacaggcgccccccaccacgcccggctaatcttttgtatttttagtagagacagggtttcaccgtgttagccaggatggtctcaatcttctgacctcgtgatccgccagcctcagcctcccaaagtgctgggattacatgtgtgagccaccacacctggctgttacacccaacctttgctacttcttgtctctgacaaggcaagtgaactcagttcacctctttttttttttttttttttttttgagatgggggtctcactgtgttgcccaggctggattgcagtggcacaataatggctcactacagcctcgacttccctgcctcaagcaattctcccacttcagcctcctgagtagctgggactacagacacatgccaccatgcccagttacttttttttttttttgagatggaattttgctcttgtcacccaggctgtaagtgcaatggcacgatcttggcccactgcaacctctgcctccctggttcaagcaattttcctgtctcagcctcctgagtagctggaattacaagcgcccaccaccatgcccagctttttttttttttttttttttttgagacgcagttttgctctccttgcccaggctggagtgcagtgacaccatcttggcacatcgcaacctccgtctcctgggttcaagcaattctcctgcctcagcctcccgagtagctaggattacaggcatgcgccaccacgcccagctaatttgtatttttagtagagacggggtttttccatgttggtcaggctggttttgaactcctgacctcagatgatccacccgcctcagcatcccaaagtgctgggattacaggcgtgagccaccatgcccagccaacccagctaatttttttttatttttagtggagttggggtctctctgtgttgaccaggatagtctccaactcctgggctcaaacgatccgcccaccttggcctcccagagtgctggaattacaggtgtgagtcaccctgcctagcgaagttcacctctttttttttttttttttttttgagatggagtctcgctctttcgcccaggccagactgcagtggcgctatctcggctcactgtaagctccgcctcccgggttcacgccattctcctgcctcagcctcccgagtagctgggactacaggcacccgccatcacgcccagctaattttgtgtatttttagtagagacgggatttcaccgtgttagccagaatggtctcgatctcctgacctcgtgatccgccctccttggcctcccaaagtgctgggattacaggcgtgagccactgcgcctggccaagttcacctctttgagcctcaattttcctcatttgtaaaatggaggtgttaatagatcctacatgatcaagttattgtgaaaaatcagagatgtggccaggcgaggtggctcacacctgtaatcccagcactttgtgaggccgaggcaggtggatcacctgaggtcaggagttccagaccatcctggccaacatggtgaaaacccgtctctattaaaaatacaaaaattagctgggcgtggtggctggcgcctgtaatcctagctactcaggaggctaaggcaggagaatcatttgaacccgggaggcggaggttgcagtgagccgagatcatgccattgcactccagcctgagtgacagggcgatactccgtcttaaaaaaaaaaaaaaaagaaaaaaagaaaaatcagagatgcaaagtaagtatgcaataaatactgttaataattattagcagagtgaactctatgccccatggataacaagagcactctaccctacagactccaactgtaacaacagttagagtaaacagcaataaacaggctggctgcagtttgtgtctgacacatgtaatcccagcactttgggaggccgaagcaggagaatttcaagaggccaggagttcaagaccagcctgggcaacagagtgagactctctctacaaaaaatttatttatttttttttttatttatttgagatggagtctccctgtgtcacccaggatgcagtgcagtggcaggatctcagctcactgcaacctcttcctcccaggttcaagcaattctcctgcctcagcctcccgagtagcctagattacaggcttgcgccaccacgcccggctaattttgtgtttttagtagagatggggtttctccatgttggccaggctggtctcgaactcctgacctcaggtgatccgcccacctcggcctcccaaagagctgggattacaggcgtgagccaccaagcctggccgggaggatggttcttactggcagatctgtgtccgtggtgtccaaagggcagcccaggcttatgttttctttttcttcttttttttttttttaatttttattttaagttctgggatacatgtgcaggacgtacaggtttgttacataggtaaacgtgtgtcatggtggtttactgcacctatcaacccatcacctaggtgttaagggacattttttcttaaaaataaaatttaaaaaaataaagcacactgcactgacagtgtgaaattgtgtattaatgtcataatcccactctgacccagatggttggctcaaactcagtgtttctatgaaacacaatcacggatgatcggcatgcctcgtgggagaatctgaacgatccgcggagagtgaaagtccctcgtgaaaatgtcgtctgggcctcttaagtttggtggtttgtgcaaacgtgtccatggatattgtaatctttcagtggcctatgtgactccaattgctttatcaacactgatacccacccccagagatggtagagatggtgaaatattggccaggtgcggtggctcatgcccgtaatcccagcactttgggaggctgaggtgggcaggtggatcacctgaggtcaggagttcaagtccagcctggccaacatggtgaaaccctgtctctactaaaactacaaaaattagctggacatggtgtcgggtgcctgtaaccccagctactcagaaggctgaggcaggagaatcgattgaacccaggagacagatgttgcagtgagctgagattgggttcaagtgattctcctgcctcagactcccgagtagctaggattacaggcgcacgccaccatgcccagctaatttgtttttgtatttttagtagaggcagggtttcaccatgttgccacgctggtctcaaactcctgacctcaggtaaccaccctctttggcctcctgaagtgctgagattacaggcctgagccaccacacccagcttttttattttttatttattattttttttttgaggtggaatttcgcttcgtcacccaggctggagtgcgttggcacgatctcggctcactgtcacctccacctcttgggttcaagcaattctgcctcagcctcccaagtagctgcgattacaagtacccgccaccacgcctggctgaaaaccctgttttcttcccccccgagacagagtctttctctattacccaggctggagtgcagtggcacaatcttggctcactgcaaccaccgcctcccgggttcaacctattcttctgcctcagcctcccaagtagctgggattacaggtgcccaccaccatgcccggctaatttttgtatttttagtagagatggggtttcaacatgttggacaggctggtcttgaactcctgacctcgtgatctgcctcagcctcccaaagtgctgggattacaggcgtgagccaccgagccctgtttctttctttctttttttttttttgagacggagtctcaccatgtcgcccaggctggagtgcagtggcgcaatctcagctcactgcaactcagcctcccgggttcacgccattctcctgcctcagcctcccaagtagctgggactacagaggcccgccaccacgcccagctaattttttgtattttttgtagagatgggctttcaccatgttagctaggatggtctcgatctcctgacctcgtgatccgcctgcctcagcctccaaaagtgctgggattacaggcgtgagccactgcacccggcctaaccctgtttcttaagaaaaaaagatagtgtgatgcgggggattgagtccaatctctccccctctgcaaaaccctgttgcagtgttctctatcaaaacaaaacaaaaatttaaaaaatgaatagtatgactcatctcatatggtatagccaccatacacagtgtgaccacctctaaacagaatgtcacccccttagagtatcactctttctcatctccctgactgaagatgctgaaggcaccagggctcagatccctcttttctcctgtctagactcattcccttgataacctccaccagtcccacagtggatatgccatctctatgctgattacacccacagttatttatttatttattggtttatttatctctctcctctccttctgtctccctccctccctctctctctctctctctctctcgtctctgatctctctctctctctctttctttctttcctctttttccttcttgacagggtctcactctgttgtctggctggagtgcagtggtgcgatcacagctcacagcagccttgacacccttaggctcaggtgatcctcccacctcagcctcctgagcagctgagactacagctgtgcaccaccacacctggctaatttttgtatctttttggagagatggggatcttactatgttggccagactggtcttgaactcctgggctcaagtgatgctcccacctcagcctcccaatagtgttgggattacagctgtgaaccaccgcgcccagcctccgcccacaattctatctcaatctcgactctcccctgaactccaatctggcacatccaactacctcaccagtgtgtctatctggatttctcaagcttgccaaatcaaaaatggtcttcctgaactcccccaaactgctgcccccacaagcttccccatctcaggaaattgcaattccattttgctggctgttcaggctgaataccttggagtcatccttgccccctttctctcatccgatatccaatctgaagggaatttccaccagctctacctttgactattctagaatcagctacttttttcttccttttttcgagatagggtttggctctgttgcccagggtggagtgcagtgacaccatctcggctcactgcaacctccgcctgccaggctcaagccatcctcctacctcagcctcccaagtaagtgggaccaagtcatatgccaccactcctggctaatttttttttttttttttttttttgagatggagtctcgctctgttgccaggctggagtgcaatggcgtgatctcagctccctgcaacctccgcctcccgggttcaagggattctcctgcctcagcctcctgagtagctgggactacaggcgcctgcccccacgcccgactaatttttgtaattttagtagagacggggttccaccatattggccaggctggtctcaaactcctgaccttgtgatctgcccacctcggcctcccaaagtgctgggattacaggcgtgagtcaccatgcccaaccactcctggctaatttttttgtgtatttttttgttgagatggggtttcactatgttgctcaggctggtctcaaactcctggactcaagtgatcctcctgtctcagcctcccaaagtgctgggattacaagcgggaggcattgtatccagcttattttatttatttatttatttatttatatttttctgagacagagtttcgttcttgtgtgttgcccaggctggagtgcaatggcacaatctcggttcactgcaacctctgcctcccgggttcaagcaattctcctgcctcagcctcctgagtagctgggattacaggtcagggtggtctcaaactcctgacctcaaatgatccacctgccttggcctcccaaagtgttggaattacaggcctgagccactgaaccgaactggattcagtctatatttttcactgccttgtcaccagcgcctagaccagtgagtgtcatagaataggtttgtaatattggctgggcacgatggctcatgtctataatctcagcactttgggaggccgaggcaggcggatcatgaggtcccaagatggagaccatcctggctaacacagtgaaactccatctctactaaaaatacaaaaaattagccgggcatggtggtatgcacctgtagtcccagctactcgggaggctaaggcaggagaattgattgatcccaggagacagatgttgcagcggactgagatcacgccactgcactccagtctgggcaacagagcgagactctgtctcaaaaaaaaaaaaaaaaaaaaaaaagagagagaataggctgataatatgtatttgctgaagtaagtgaactgagtgcacattcacctggtccaacccacaaaaaatatgaacccatacaaatggtgcaatgtccataactaataaacccccacatacagtgtgagccccagtgtagaaagtgagaccctcaaatgcattgtgagtctctcatatagatggcaagatagcatataaataatttgtgggtcacgcgcagtggctcatgcctgtaatcccagcactttgggaggctgaggtgactggatcacttaaggtcaggagttcgagaccagcctcaccaacatggtgaaaccctgtctctactaaaaatacaaaaaaattagccaggtgtggtgacgtgcacctgtaatctcaactacttgggaagctgaggcatgagaatcgcttaaacccgggaggcggaggctgcagtaaggtgaggtattaccactgcactctagctctggccaacagagcaagactgtctcaaaacaaacaaacaaacaaacaaacaaaaaaccaatttgtgccccacacaatctacttgtgagtgttatcgaggcagtataatttctttttttttttttgagatcatgaggcagagtctcgctctgtcgcacgatcttggctcactgcaaccaccaccttccaggttcaagtgattctcccacctcagcctcccaagtagctgggattataggcgcttgccgccacgcccggctaatttttgtatttttgtagagatgaggtttctccatgttggccaggctggtctcaaactcctgacctcaggtgattcgcccgcctcggcctcccaaagtgctaggattacaggtgtgagccaccgcacccggccatttcttcttttttttgagacggagtctcactctgttgcccactacaggcgtgtgctaccacacccagctaattttttgtatttttaatagagacggggtttcactgtgttagccaggatggtcttgatctcctgacctcgtgatccgcccgccttagcctcccaaaacgctgggagtacaggcatgagccaccgcgcctggcctgtatttttattttttggagacacagtcttgttccgttgctcaggctggagtgcaatggcgcaatctcagctcactgccacctctgtctcctgggctcaagcaattctcttgcctctgcctcccgagtagttgggattacaggcacccgtcaccatgccttgctaatttttgtggtatttttagtagagacagggttttaccatattggccaggctggtctcaaactcctgatctcaggtgatccacccacctcagcctcccaaagtgctgggagtacaggcgtgagccatcacacccagccgaatttttgtatttttagtagagatggagtttcaccatgttggccaggctggtcttgaactcctgacctcaagtgatctgccttcttggcatcccaacatggtataactcttgtaagcagggggaatccctacatggacattacaaattcaccacagccagagaacatcctaaactgacagtcgagacctcctttcactgcagcaggctccctaggccaagtgaattccctcatgcagagtacacacctctctgctaaaagtctaattctccctcactcctgatgcaaacggactgtggaacacaaaaccctaccctgatcaataaaaatctcccccaaacataatgtaagctcccatgggcaatgtgaacctctgtcccttatgagcctccccacagacattgtaatctctttcatatcgatgacaaagttaacacagacagggcacatctccatgcatggagaactctctgtggctgctgtgaaccccttttgtgatagcatgaagcactccccatggggctacctacaaaggcagtgtgcactctcttgagtgtaaatttcccccagattcagcatctacccaatgtgcacaatataaactgctttgtcaaacctccctcaactccgggtccacccaatatggaaggatgaattgtcttttaggattacattaacggctagatgcagcggcttatgcttatgatcccagcactttgagaggccaagatggaaggatggcttgaggctagaaattggagaccagcctggacaacatagtgagactccatctctacaaaaaaaaaaaaaaaattagcagggcatggtggtgcatgcctgtggtcccagctactcaggaggctgaggcaggaagattgcttgagcccaggcactcaaggttgcagtgagctatgatgctgctactgcactccagcctgggcgacagagtgagaccctgtctgaaaaaaataataataaaataaaaataaataaaattaggccgggagcagtggctcatgcctgtaatcccagcactttgagaggccgaggtgggcaggtcatgaggtcaggagttcgagaccagcctgaccaaaatggtgaatccccgtgtctactaaaaatacaaaaattaaccaggcatggtggcatgcgcctgtaatcccagctacttaggaagctaaggcaggagaatcgcttgaacccaggaggcacaggttgcagtgagccgagatcgcgccactgcactccagcctgggtgacagagcaagactccgtctcaaaaaaaaacaaatttaattaaaaataaataaataggccgggtgcagtggctcacacctgtaatcccagcactctgggaggccgaggcgtgcagatcacgaggtcaggggatcgagaccatcctggctaacacagtgaaacctcgtctctactaaaaatacaaaaaattagccgggcgcagtggcgggcgcctgtagtcccagctactcgggagcctgaggcgtgaacccgggaggcggagtgtgcagtgagccgagatcatgccactgcattccggcctgggcaacagagcgagactccatctcaaataaataaataaataaataaatacaattatattgcagtagtactagtagtatgatagtttaagattatataaataatgtaacagggccgggcgcagtggctcacgcctgtaatcccagtactttgggaggccgaagtgggtggatcatgaggtcaggagttcaagaccatcctgaccaacatggtgaaaccccgtgtgtactaaaaatacaaaaattagccgggtgtggtggtgtgtgcctgtaatcccagctactcaggaggcttagacaggagaaacacttgaacccaggaggcggaggttgcagtgagccgaggttgcgacattgcactccagtctgggcgacagagcaagactctgtttcggggaaaaaaataataataataataacaacagtgtaggttataagattccttccgagtgtgaactcctcgtggacagtgaatttcccccaatctcaacacaaataatttgtgaacagtgggactttctcatagatgtgaatatccttcatattccatgaaccccattggacaactaatatttcttctatgctatgaactagctctatgccctagcacattctttcacacgtagtttgagtgtttcatggacagtatgacttgcaatagactggatgcagtttcctcacaagtggtgtgaattccagtgtggaatctgaacctgtcacaggcaaaagaaagcctccctgcggccagcgtacccatattgcttcccattagcctcggaccagggcgaatacaaagtggagggcatagatgcattgcagacaggttcaccatctggttgtaaacccgtatctgggcagcaggcatctactacaaacagggcatctccctgtcctcctccactccagtgtgataccctcctacccctgggatctttaaaaatctgcctctgtcaggggcgtacacccacaaagtgtagctctccacgtaatgcagtgcgaagccccaagaagcgctgcatttcgtcatctcggccccctgccccaatgcctagtgggctgtcaaactgcgctgtcctaaatgtcaaactcttggaggaggtgacctgtcccccgggccccaggccgcgcgcgttgcctatactgcagcgcgcgacaccccacaagcgcgcgttctctcccctcccggtggcaacagggctttccgcggggccgcgccagacttttcgagaccgtcaattggtcgtagtcccggccacccggcagccaatcaacaaggggaaaggtgacatcactggttctcctcccctcccccaatccaaacttccctactccgtctaccggcagcaacaaccacgtgggggaggggtaagagagtagaaccggtgaggtcattgcaccgccccggccgctgctgattggctgcggggctcgcgggtggcggttggctgctccttgcacctccccctcgtgccgctaccgctgccactgagaggagccaccggcgacgccagagccaggaatacgggtgagtcggggccctgggtctaagatactcctggcgtccagtgagactcacgacgaactgcccttttcgactttttctcctcgccgggtttctttggtgctccaagcactctgtcacatgggagttgtagtctgccttgtactgtcggctatgggccgaagacgtgagaagactacggttcccagcaggaactgcgactagccggtcaacaaacgttcgggccacgccttctacctccgttcattggacaacccgtcccttagcccctcctcctttcatttcattggctactgtccctcacagaggctgggttccggcctaggctgcatggcgactgggtactgtatttgtcatttggaactaagacggcctgcaattggacacgactggtgtccttcacttgttgtagggtagggccctaggcagatcaggcagtcgtaggctcaggttggtgtcggtcccggagggaggccggtcttggactttggccccgccccctagcgctgcccgatgggcccaattggtcgccgcgagcgtcgctcgtcgtcgagaggcggagccgaccagtctgcggatatctattggtctaggctggcgccggtcagtggggttgtgatcgctgattggctggctgctccagctgttgcaggtccattcaccattttgtgtgttggagtaaaaaaaaaagggagaatcgagagggagagccggagggggggcggggagggaccggaccggaccgagccggggccacggccccccgccccgaaaccccgccgagcccaaggtgaggggcggggccagggctgacacaggaaaggggggtccggggggctgggggccgagaggggacaggtggcagggacggggagggggtacagggggaaaggggtgggcggaatggtgggaagggaggagggagtggaggaagtggtgggggtttgacagaaaaagggtaactgggggagggggtggtgggcaaagaagggtaacaggaatggaggggtgacaggactagatcagggtgacagggagagggaggggacagagttggagagtgtgacaaggagaggtgatggggagagaaggtgacaggtccggagatggctgacaggacagtgactgggaggaataggtgacagagataaatgggggtgacaaggagggggtgacaggagggggcctagggcattttaaccgagaggtagagatagaggtagtgacaggatgagagagagagtgtcagagaagctggtgccaggagggctaatgggaacagagggtatgagaccccaaagagccagggcctgggctggcctgggctccgggagttactactcagatctgaggaaggtgagggcccccggggcttgggtgggagttattcagacagggtggacaggaagagagtaggccctaggggaaagaaagcagctctggggcgaagagaggctgggccaggcagcaaggtctaggggtccaggcggcatagttgtaggccctgggtggggtatgcaaaggtttgtgcttggaaaaaactggagccagatctcagtccccaacatggtagtctagtgggtcagcgggtattaggtggtgatggctgcccaacttctgggcatttgggtgccagccccgggacgccctccaggctctgcctgtgaggaccccaggattggcccaagaaagggcaggcctgggactccagggtccacaggaggagcaggcccctagtgagagagcatgaggtcaagggtcccccagtagctggaagactgagtcggggttgcctctcattgtgtttggcttatggttctgggtcccccaaccctcctagaggcctctgttttggcctctcaggttctcttagtcacttcagagtaaagttttttccccttttcttttctcagggcagctcgaaagggggcgggcagtaatgactgttcaggaagtgggtgaggttggcctgttgggcttgtcctgctttctttgaccttatcccacctatccccacttggagttggagggcatatttgggggcctgcggggggctagccgactcagccaccctgccagagccagcccagccagggcggggatgcatgcaggcaagaagaggggggctgggcttgcgggtatcacgctgggtgctgtggggggaggagcaggctcccatccagtgggacagagaaaccctggggtgtagctctgtgtcccactgtgtgatgacgtgtgcgtgcttctgtgcgtgtgtgtgtgtttgtgcgcgtgcgtgtgctcatgcacggccccgtggcagtgctgggtatgagctcttgccccagacatgcccctgcctgctccctgccaggatctggggagatggctgtacctggcagccctagggtgcagagcagagtgggcagccgtccctcgggactctcagctgcccacttcttcccacagtgcctggccatgccaggctgcccagaggggcagagggagggtgggggggtggagaaaggctcatatcacagcccagtcaccaccctttttgtgacttggtacttgtgcatgtgtgtgtgtgtctgagtgcatgtactctctgcatggtgacagtgcgagtaaatgtgccctctggatcatgtgacaggcagcacactgaaatggtcaggagcacggactctggagccagagagcctgggttcagaccctagcactgctgtttcccacctggatgatcttggacaagttgtctcatctttttgtggctcagtttcctcaggtgtgaaatgaggccgatagtagcacctgcttttagggctgttgtgaggatgaaacaggttaataaaggcaagcttagcatggagttcaggacacagggagtgctccataggtgtgaactgttagtgcttttgatgtccccttggggcattcagagcatgtgctctgtgtcctttgcagagccagcaggtgtctgttccccaaggagccagagtgtgtatactcaggggactcaggtgctcacctgtgcctggtgctgactgaggtatcacatgagttgacagcagccagagaggaggccttggggatggtgggatggagacagtagactcagcaagtgggaaatcttagggtacactggctctggagaggttcctgagttgctccgcgtaatcctccgctctcccaccctgcaggtggacaaaaatgaagccaatgaagaaggcatgcactggcctttcaggtcctggcagtggcagcaagtcccccccagccaccagggccaaggctctgaggcggcgaggggctggggagggtgacaagccagaggaggaggatgacgaggcacagcagccgcaaccacagtccgggcccgaagaggctgaggaaggggaggaggaggaggctgagcggggccctggggctgaaggtcctccactggagctgcaccctggcgacccggctccaggcccagcagaggaccccaaaggggatggggaggcaggccgctgggagccctcactcagccgcaagacagccacgttcaagtctcgagcgcccaagaagaagtatgtggaggagcacggagctggcagcagtggggtggctggggcccctgaagagcgggtgcggacccctgaggaggccagtggcctgggggtgcctccacggccacccacctccactcgttcctcctccactgacacagccagcgagcactcggcggacctggaggatgagccggctgaggcttgtggtccaggcccttggccccctggcagcaccagtggcagctatgacctgcggcagctgcggtcccagcgggtgctggctcggcgtggtgatggccttttcctgccggctgtggtgcgccaggtgcgccgaagccaggacctgggcgtgcagttccctggtgaccgagccctgactttctatgagggggtgccaggcgctggtgtggatgtagttttggatgccacacccccaccaggtgccctggtggtgggcacagctgtctgtacctgtgtggagcccggcgtggctgcctaccgggaaggtgtggtggtggaggtggccaccaagccagctgcctacaaggtccgtctcagccctggccccagctcccagccaggcctaccaggcagcctcccgcagcccccacagccactgcaccgtgagccagaggaggctgtgtgggtggcccgctccagcctacgcctgctgcgccccccctgggaacctgagaccatgctgaggaagccccctacaggccctgaggaagagcaggcagagcctggggccaccctgccaccctgccctgctgccctggaccccaaacagcccgaggatgctgaggtctctaagatcagctttggtggcaacctgggtactcactgtgaggagggcgaggagaagcaccctccagccctgggtaccccagccctgctcccactgcccccaccccagctcctgtcaccaccacccaagtctccagcctttgtgggccccggccgccctggcgagcagccctcgccctgccaggaggggagccagggcggcagccgcagcagcagcgtggcctccctggaaaaggggacagcaccggcagcccgggcccgcacgccactgacagccgcccagcagaagtacaagaagggcgatgtggtctgcacacccagcggaatacgaaagaagttcaacggcaagcagtggcgccggctgtgctcacgagatggctgcatgaaggagtcacagcggcgaggctactgctcacgccacctgtccatgcgaaccaaagagatggaaggcctggcagacagtgggcctggcggggcgggccggcccgcggccgtggcagcccgtgagggcagcacggagtttgactggggtgatgagacgtcgagggacagtgaggccagcagtgtggcggctcgtggagactcacggccacgcctggtggcccctgctgacttgtcacgctttgagttcgacgagtgtgaggcggccgtgatgctggtgtcgctgggcagctcgcgctcaggcacgccctccttctcacccgtctccactcaatcgcccttctcgccagccccatcaccctcaccctcaccactcttcggcttccgccctgccaactttagccccatcaatgcctcaccagtcatccagcgcactgcagtccgcagtcgccacctgagcgccagcacccctaaggcaggcgtgctgacgccaccagacctgggcccccacccaccgccacctgccccccgagagcgccactcctctggaatcctacccaccttccagaccaacctgaccttcaccgtgcccatcagccctgggcgacggaagacagagctgttgccgcatccaggggccttgggggcccctggcgcagggggtggaggagccgccccagactttcccaagagtgacagcttagactctggtgtggactcagtgtcccacacacctacaccctccacgccggctggcttccgggccgtgtcccctgctgtgcccttctctcgctcccgccagccctcaccattgctgctgttgccaccccctgccggcctgacctcggatccagggccctctgtgcgcagggtgcctgctgtgcagcgggactcacctgttattgtccgcaaccctgatgtgccactgccctccaaattccctggggaggtgggcactgctggtgaggtgcgggctgggggacctgggcggggctgccgtgaaaccccagtgccccctggggtggccagtgggaagcctggcctgcccccacctctgccagcccccgtgcccatcaccgtgcctccagctgcaccaactgccgtggcccagccgatgcccgcctttggcctggcttcttcaccctttcagcctgtggccttccacccctcacctgctgccctgttgcccgttttggtgcccagcagctataccagccaccctgcccccaagaaggaagtcatcatgggccggcctggaacaggtaagaggtggaagtggatgggctgcgccaggctcacctcgtagagggcctcttgcaagctgaactcttgagaggtgagctcctcaccttgggagggcttcaaggggaggccggcctcctctctgcacagatgttgctgttggaattcacatgtcaggaaagggattggacttttaaggctcaaggcaccgtttccagaggcctcctgtcagagaacgtggtctcaagaggtctatcagtcagcaaacctttcttgagtgcagactgagtcaggtctccatggagctgatgggataagagaatgataattgtggcaacagcttccacatcttgggggactgggcgagggcattgccatggtaagcactgcgtgtaggtgagcttgccaaattttcacatccacctcatagagcacttaccacctgttctaaagacccttttcaaatattagctcattttatcttcacaaccaccctaacaggaaagtgctatgattatgcttctttagaggaaactaaggccagggtcataatttgtccagggttacatggctagtcaatcctggagcagccctcaaacccaggcaggctggcccgtgaccacgtggtcatagtgctggattacagatgggcagatggaggctctaacaggtccttcccaggaggtggcaggaccaggactggagccctcatctttaccactgtgtccagtaaacatcacaggcacggccatggaaggcagcgggggtgtgctgggcacttctccaggtgtgaatctagcctggctacactgaggacagggcgtgtaagccaggagttgaaggatgagtgggaacctgcaaccgtggggtggaagagcctcctgggaggagggcgatgggacagccccaaggccagaaggagcacagcctaggaggggaagagggaaggccagggtggctggagagctgaggctgggggtggaagagtggcatttctgagatggtgctgaacagccacggacccaggctaggctgggccttgtaggagcaacacagagagggtgacagacctgtcggaagctccttcctagcatttctttcttatttgtttatttatgtatatatttttttatttttatagagatggggtcttgctgtattgcccaggctggtctcgaattcctgggctcaagcagtcttcctgtcttggcctcccaaaatgctgggattacaggtgtgagccactgcacctggccttatttatttttatttatttattaatctactgttgattcagggcctggccctgtgctgtgcctggccctgtgctggatggtgctgaggacacagccctacttacacagggctcacagcctctggaaaagacagacccctccctagacagtaacagtctggggtggtcagggatggggtggaggaagccaggaggccgtgggagcccagagaagatgcctgtccagcctgagaagtcagagaaggcttcttggaagaagggccagatgcctatgaactgaaacctgaagggtgtgcagatgtgagcccggcagggtaggcaggaaggatcttcaggcagaggaaagagtttgtgcaaaggccttaaggcaaaagcagatatttgtaagatgttgaatctggaaagtcaaagactctaaatggcaggtgagtgttggggatgtgtggctggattggtgagcaagggtcagatcagagaggacccttaagtaagatcattatgaactgtatcctgagggtactagggagtcatggaaggttttgagcagattcaaccactgctgcaccatagagggtgtgtttgagtctctgaggccagaagcagggagaccagggaggaaggaggctgggtgtggatgtgggtaggagccgctgtggcttgggcttggggcaagagccctttcaggaaggagcactggcctggcccttcccttttggggctccagcccaggccagtcccgagggacagggcacagggacacgggttatgcctgcccctgatgttcatatacagaactgaggctgtgagctgtgtgtttcaccctgacaccaacattttttacatttgttgttataggtggtacaagcaaaatttcacagcagggatttctgtccttaggtaatgaagaaactaaatcagagggtctctaaccactcccctacccttcacccccccatatgcccacaacccccaacatggcccctacagcattgtctcatgtggccactcctgctgtgtggggaggaatggctctggtgcaggggatgctgaggcttaccagagtaggcccagcagggctcttgttaccattttccagatgaggaaaagtgaggccctgacaaatggagagtcttgattgaggccagccagccagtgaggggcaggatgagagctttgagtcatctcccaacctctagactgtgggactctcactaccaaaagtggcagtaataataactcaccgagcagcactggtgatgcacgtgcctggcacacttcaatgagtcctgctgagcctttactccctgaatcctcacaatgccccaggctagtaccatgattattagttccattggacagaggaggaaaccgtagcctgaaaggctaagtgacttgcccgggtcctccagctaggaagagagagagccaggattttgagacagagtctggctctgtcacccaggctgcagtgcagtagcgcaatcttggttcattgcaacctctgcctcctgggttcaagcgattctcccgcctcagcctcccgaatagctgggattacaggagtgtgccaccacgcccggctaatttttgtatttttagtagagccgaggtttcaccatgttggccaggctggtcttcaactcctgacctcaggtggtcctcctaccttggcctcccaaagtgctgggattacaggcttgggtcaccacaccgagctgtcaagagccaggatttgaactcagactgtgcggctccagatcccaggcccttaagcactttcaataataacaatgataacaataatacctactctactgagcgaagactgtgtgcctaaccccgggcttggggccgtttcatcagctccgcctgatgctgtgaagtagattgccaggcctgttgtccaggggtagactgaggatcagagaagggaggccccttgctgggggccacctggttgtcataacttgtccagtgcctatcctggcagttctgaggagcgcctccctaacaacacccatgctgaggtatccaggctgccttcaggttcctgaacagcctgccctttcattcttctcccagaggcctccctaagcccttgggaggtaggcagcttggagccttctccccatggggcccagatagggcagaccgtgttcagtggtatagtgaggttgcaggcctggtcccttctgctggcccatgccagggcctgaccctccatcagagggcagcaggtgtgagggggcggcccagggcagcctgcctgctcctgcccccagccaggcatttgcttccgctgggggacttgctggggcaggcggctggcattctccacattctgtgcatggcatggccagccagctgccgttgccacctccctctgaatcttcccgcctgctccccaggagaggatcccgccccagggcctgcagccccagtccaggaggccagatgtctcagccccattcctggtatggcctccctcccagctcccagcttcctgcctggcttccccttgttgacaggcgttgctccttctcctgggcctctgtctggcggtctggctctgtctgtcttatccttggcttcctatatctctctggtctcctatttctaggtctatacgtgtgtctctctttggacctctgtctgtctgactcttctttgagtctgggggctccctgtgccttcctgggtttgtccctctctggacttcagtcctcgtctgagctttcagcccaccctctttctgttttggctgccagctggcatcctgtgtctctgagccagccttggcctctctttggccctcctactcccactctttagatggacttgctgcccccatgccagcctcccagccccaccctgtgcatatcaggtgttctgttcttttaagacagtgggcagttgccaagcaccaggtctcctacttccttcttggggagtgttgggaggttgtccaggccagggagccccctcatgctctttgacaaattaactgcctactactgtccctgaaatctgctgagaagtgctgagatccatcctgcagacccatccaccatccaagcacctgttcccaagacaggcaggaaagcgggggctgtatggaccaagctaggagatccggctgtagggggcggcaggaaagaagcttcagtgcccacccacctgccagagggcatgacccaggtcatcctacctccccctttaccccttgcctttcatttgatgccagcttcattgaaaggagtcccagatatagtgcaccccaatgggtagggcctcagagacgaggcagtacccaccaactatgcttgggcaggtggggaaaaagaggggccaaaggggttaagcctgggtctcctgactccccagatccagatactgcccaccataatttccattttgtttcaaacagtgaaccctatctccaccagcagaagccagctccctcctcatccctctgccaggcccagggctgagcagtcctggggcaggtgggtgaggaaggcagatgtggatgcaggcacaggcaaggatgagcccagggaggtactgagtctggggaagccaaggggcagggacaactcagtggttcatgggggctgataagggaggatcaggtaggtttctcactggaggtgacatttgagctgaagtatgaggaatgagtagatttcagaatagtcaaagaaaggaaaaggcaattccacctgaaacagctgcatgagcaaagaccaggaagagtgaaagtgcatgaactccgagtggctagttgaggctggagctgacaccagagtccaggcttagcagaagggtgccgtggacgacaggcccagcttgaatgccaggctgagaagctggggctctacgcgggccagtaaagagtcaagaaggcatttagagcaggggagggaaaatgttggatctaggtgtcagagacccctggagaccgccctggaaaggcaggagttgggaagaagatggcttggggaagaggaggagaggaggaagagcttgtgaaggtgcaggagtgagtcttggtaactgtagaagagaccccagctcccccagcttagcagcccccagcaccaggagctgcgaggcgtcaggctgcctcctggcggcaggcggcggcgggacagcaggcgcgcgcatgcgcggcagagggggttggggggtacgtcccggagcccccggtgcccgggtattaatggctccattagtggccgggagggaggcgcattagcggcggcgacggcgtctggctcccattaccaccggcggcagcggctgcaccgcaggcggctggaccctagcccgccgcgccgcctcctccacccccaccctatcccctgttcccgctccccacgagggcccgggcagggaactcccgtccccctatttcagcggaaaagctgattgtgaagccagatagatttgggttcaaatcccggccgtgccacctcgcggctgcaagatgctatcccccctctgagcctgtttcttgcgaagtagtcggggaaaccgggtgctccgggggctgtgtagaagcggactggcacccagcgagggccgcgcccagcccccgctggcacctaggggtgtgggttcccgcgcgcccctgggtgcagacctcctgtgtcgggcctccgtccttctcattggctgccgtctcgcccgctgaccgctgattggccgagacctgcttctccgcccctgagcgattaacccctgcgctgccgcgtcctcgggctgggtggggtaccctccctcccaccgcagacagctcgggtgccagctggccggcgccccgccgcggcccgcgtgggtgtcaggccggccgggcacccgtccgccctccctgcacaaagcggctttgtggagcctgccgggggttggctgggggccaggcggcgagtggaaaatctcgtgagcgcggggaggggaggggaacgcagggcggcgccccctcctctgctcgggccttggcgcctccctcagcccgcgccgaccaaccctcccagcccaagcgcctgtacacccctttcccgcccccgcaccttcccttccccaaacccacgtctctcaacccccccacccccgcatcccacccatctcccaatccctggggaccatcccccacacactctccccagtctctcttttcctcctggtccccctgcctaccccagccccactcacactgactcaccccggcgctatttttagccccccatccttgccgagccgcgccagcccaatcctgggctcgttccccaggcaaccctggccgtcgccgacgccgcccggggtgggtgggtgggtgtgtatgtggaaagcgggtgaggggagctggggacaccggggtggtgagctgaggcggggacccgggcctggagagcagggtggggagccgcaggcggccggcaggggtgcggtgcctcgcgggctcaataaatgggccccatgagtttagagtgcgcgtctgcctgtccctcggtctgtcagcatccctggctgctcgccccaggcctctgggcaggcctcagcctgtaccgcccgcccgggtggctgttgatgtcttcgtctgggttccctgtccccaggcctgggtgtggtggcacagtgggggctgtttaggggcagtccttctgtggagttggttaggggttggtgcagggggtggctgccatcacagtcctgctcagtacctttttccaactagggaggccccaattagggttggggatggcaagagagtgggagctgtctagggataggacctgctccctcccctctgctcctaatccacccccacccagggttcctccaccctgaacaatagaagctaagtatagggctggcccagcgcccagggcaggggggcccttcccgcccggattcccgcccctccctgccaggctaggcccccacttggttgtaccctgccccggacggggcctcttcccatctctcctccgtgggcactgtgtattctaccagatgtgcacccctcccagatgtgtggggccctctttccctcctgtgccatgcctggctctttttctcaaccaacagaagtcggggatctggggggcagagctcctctgagctctgtccttggactgcattgcagtagagaaggggttaacttgccagtaggtgactcactcaccggtggggagaggagggggcagtggtaggggcagtggtggggagatagcaggccacattgatttcagcctcaattcgtgcctcacattgcagtccctggggcagtgaagtaatggagggtctgagtctggggctgcataggaaggagggggcagtcacctaatagtccctctggttgcccctccaggctcacagccaagtgtctggccctgcagtctctggaggtcagagggctacagaccttcccttcccttttgggctcaggttacccagtttttgccccctctccattccttcagctctgtcagtggatgaggcaggttggggaaagggctcgtctgctcctgttgaccatccaacctgtgtaagagcccagtcttggtccatctgagcctgtgcaacctttacgtgcccaagtgtgtgaccccagtcctgtgcctttactgggtatggctccagggcccctcttgggtgatccagggcctctgggtctctgccagatgggctccacatccttgcctgtgtctttgtgtgagcccccctcgcctttctgtggtccacgtggctctgtatcattgtctaactatattccccagcctctgtttggagttccctccctgggtccaccctgaggttaagccttgagtaatggaaacagcacttgagttagagctctgggctggtacatcttgactgcatgatcttgccacagtttattcaatctctgaggctcattttttcacctgaacaatgggtgtaataaagcatacctccctaggtggctgtgaggattcaatgaaccagataatacatacaagctcccagcacacagcagccccagtaagtgttagtttcctttcttcctggccctttttttctgggagggggggcggggttagtgggtggctggcagagcagtgtggtggggccagccatggtgtgctctgtggttccctgccttatactgctagacagagggtccagagtggccaatgagtgtcagggtgggtggctgaatgatggcggtggccactgagctctgtatacctgatgggcctgggtactgaagcaggtagcacccattagggtaggattatatagagggtggggtcggtatgatggtgtctgtgagagctgagtgtgcactggggataggaggcgctttgtgagtgctaggaaggctgtgtgtgtgacggaggagtgtgtggttgtgtgggaggggtgtggagtgtgtgtagtggacaagcagggctatgctgagttcctcctgtttgacatgttgtctgtttgcatgattcatgtgggctggtgggggtgtgatgaggatgcgggttggcgaagcatgtgtgacagggcatggatgagatgggtgatgtgaacaggatgggtgaatgcacgatggtgggtggggagcgatggaccgtgagcgtgtgaggttgtacatctgtgtgagcaggtatgtgaggtgtgacagcgtgggtgtaagacagagggcatatgtgcccgtggggtgtgtaggagataatgggtgtggcacgaaagtgtgtctgtatgtctgtgaggagtgtgagtgtgagtaggtgagggctcaggatgcctcgcccagccctacgcgcagtttgtctgcccagcggggccaggcgcgcccaggcgggtgtgcgggaggcgggccgagccgcgcgtgagcgtgttcctcgcgcggactggacacacaacagcaccacgcacaacccagagacctccgcagcgcggcgccccgaaccgcccccctggctcggtgcctttactgcagtgcgccctccctgccaccctcctaccgcggccccgcccccggccggctcggggccaaccggagcccgccccgccctgcccttatttgcatatgactgacgttcccccggggcggccaatgggggcgggcgcggcggggcctgacccgcgcgcggcggcggcagccaatgggctcacgcgcggggggccgggcttgcgcggaaggccgcgggggaagcggggaaggggcggggggaggcgcggcggggggaggggagcgcgtagtagtggcggggcggggaggcggtggtggttcggcgcggggctcgctcggagcgcacggacgcacgcacgctggtccgtctgcccgcccggggccggaggtcgacccggcgctgagcctcgggcccggggcccggaaaggcggggcggcggcgccggcagccgggacgcgcggggccagagccgttacccgccggagctgcgagggagggagggaacgagcgagccagcgagcggggaagggagggggccgcccccgcgcacgcgcgtcgcgccccgccccgcctgccccgcctgccccgcccgccggactccgcgagggaggagggagagggagggggcggtgccgatggcccccgtgccgcgcgccccgtgacggcccccgcgcgcgccggggggcggggcggggccggtgcgcgctgacctcccccgccccccgggcggcgggaggcaggcggcgctgtgcgcaggcgcgcccggcagagacccccgcgtggggcggccggaggggggcggcgggggggggggcatgcggcgacggcctcccgctccccccgggcccaagcggcgacggccgaggagcgggctgcgggcggagcggcgtcggccgctgaggaggtgcgagcccctgccgggtcccccctgcgccggaccatgtattcggcccacaggcccctgatgcccgcgtccagcgcggcctcccgtggcctcggcatgttcggtcagtagcgcctgggccctgggactgcaggggtcaaggtgtcggggtgctaagtgcggagtaacggtggtgggggtatagtaggggagagaacagtagaggcagagtaaagggatgacggggaaagttacggagctcggccgggccgagtggttagtgatggcaggtgggagtgtagcggagtggggcgtatctggggacagctgtgatgttaaagtgatgggatggcacaggtccgctgtaatagaaaggtgaggggtgcagagtaactggctctggagcatggggtagaataggaacagcacgagacctgctggtcctaggggaggaggcttggattgggtagtggggctaaggacagggctcaggaagcgagtgaggcactgttagctgagatcagagtgacaggctgcagtgtgtggtgtagtttgcagagagcgcgacacctaagaacctggagggttgtgcactggggaggggttcaggagggagcaggaccaaaggactgccctccattgtctgctgggtcccttttccccaccccccagaaaagaggaggccttgatgggaaagatctttgcaaagagaggcacaggtctaagtccctggaggcttttatatggggttggagggcccagcgggttttcaggggtaagggacagggtcatcgtagtcttgagtgctcttcagtgctgtcttcgtgatcccagtcccttgtttcctgaggtctactttttcctttgtcagcccctctcagaatcaggtctcgaggccagtgcctcgcacagagctcccccctgtccaggcttctgaaggcatggggaggtcacctcaggtcaggttgatccggatcaagggaaggcctggaatgatggagagcagggctagggcggttccctcctcccttcttcatcttccccgagcaggggcctctctcctctgctggttccacttcccccagggagccaggcagtgtgaggggaagcccactggtatcctaggcccgccccaaaagtccagccaggggtaggtcccagcctagggcttgctcttccaccacccacctcttggggctgaaggttggacccctgggaccagcctcttggtgaggaagcatcttcctgtgcatatcctcaaggaaacacctggcacttgtgccctctctgggtagagacttgttacaattctctcttctggcccattgtccgtggtttttcttccaaggagtttaccacaccctcccctgttttgggcaagggggctggaccctggactacagataagccgaggggctgatggggaagggaggctgggaggccgatttctggatggtgcattgtctttgtgggggcaaaggagagagctgctggagccacctgtgcccagccaggaagggcaggtctggcactctgtgtttgtggtgggggaggaaggcaaggagcaggacctctcccacaccacagttgtaagagaccccacagcctgtgcatagtgaacggagagttggaggggaggggacgtggggccgtatgcctcaggaaagggaaagagagcatgaggccaaggtgagacgctgtgttgggcggcgactgggctgctgggaatgtggcatgacgggggtgggggtcccagcccgtagaggtctggggccttgggagtgtgggatggcagccaagcatgacctggtttgtggcaggagcaaatcgttcctctggcctggtccctggtggcagggctggtggagattggtggggggaggagtggggcgtgagtactatttcccttccctgcttctgttttcttttttataaatctagaaacctttcagggaggagtttttcctgagtgacgttgcatggacgagtccaagaggctctggtgttgggggtggggggtagacaaaaggggtggggctacctcatctagggtggggaagagcttgagttggggttggggccaggctctcctgctgcacagctcacctggctcctttccacagtgtggacgaatgtggaacctcgctctgtggctgtgttcccttggcactccttagtccccttcctggcacccagccagcctgacccctccgtgcagccgagcgaggcccagcaacctgccagccacccagtggcctccaaccagagcaaaggtgagggctggtggggactggggggaggcaagggtgtggggtccaggtggcctaggagccctctgatctacctctgtgtccccagaacctgctgagtcggcagctgttgctcatgaacggccaccaggtgggacagggagtgctgaccctgagcggccccctggagccacatgccctgagagcccaggacccggacccccacaccctttgggggtggtggaatctggtaagggtccgcctcccaccacggaggaggaggcctccggccccccaggagagccccggctggacagtgagacagagagtgaccatgatgatgcgtgagttccctgaggcctgggacttgggggtgggatggccagagacatggccctcactgtccctgctgccccgccgcagcttcctctccatcatgtctcctgagatccagttgcctctaccgcccggaaaacgtcggacccagtccctcagtgccctacccaaggaacgggactcatcttctgagaaggatggacgcagccccaacaaggtactttatccctgcctgtcctgtgctcaccccgtggccacccacacctgtctgccaggtcctaactgtcccgctctgggctgtgtttaatgcagcgggagaaggaccacatccggcggcccatgaatgccttcatgatcttcagcaagcggcaccgggccctggtccaccagcgtcatcccaaccaggacaaccggaccgtcagcaagatcctgggcgagtggtggtatgccctggggcccaaggagaagcagaagtaccacgacctggccttccaggtaacgctgttgcctcttggctcctcccagcttcttctggtggggtgggtgagtgaagggttgccctgccctctcctgccaggtgaaggaggcccacttcaaggcccacccagattggaagtggtgcaacaaggaccgaaagaagtccagctcagaggccaagcccacgagcctggggctggcaggagggcacaaggagacgcgggagcggagcatgtcggagacgggcactgctgctgcccctgggggttagtcagccccttggctctcccaccctgccacctccctccccgagagccaccagctacccccttgcttgctcctcccctgccccagcagctcctctctgctctatcgctttaatttggcgacccttatccgtaaaggaaccggcagttgattcatgtgacggagccagggagatccacacagatactaagattcccaaacagcaatctcgttatcaactgttgtttaacgagtgtttactatgtgcctggcactacagggaatataagctgtagtctgcaaaaccccattctatttctagaagaagaaactgaggttcagagaggcaaaatcacttgcttaaagtcataaacaagcaaatgacagagccagaatgtaaaccccagttcggcgggcccccagcaccatagttggggccactgcagctcgcaaacacccctgatgggctgcttccacttattgaggttgtctggtgtgcctggcggtgttctggggcacatttttggagtgagcctatgggtatggcagttctgtgaggttagatggatagttgctatggatatgcacttctatgagagtggggacactagttacttcctctttgagatgagggaaccgaggctcaggccagcggttggctagccagcaccacatgaacctctctccaggcctccttactttcaggagggctgccccccagggaatgggcctgctgcaaccccagagggcaggaatcagcaggaatgagatgctggactggtggtgggtggtggtttttttttttcaccaagtggcccagaaattccagcctgcttctgcctagtacctagaaatatctatgggttgttgggccagtctaggtgctggtgacaggcttactgactgtcatagcgccactctctactttacagtgtcctctgagctcctgtccgttgcagcccagacactcctgagctcagacaccaaggctccggggagcagctcctgtggggcagaacggctacacacagttgggggacctggctcagcccggccccgagctttctcccacagcggggtacacagcctggacggcggagaagtagacagtcaggcgctacaggaactgacgcaggtctagggtgcaggccccctagtgggggtgggcagggaacctgtccagggcagcagccccgctgaaccctctctgccacctatcctgcagatggtgtctggccctgcatcgtactctggcccaaagccttctacccagtatggagctccaggaccctttgcagcccctggtgagggaggtgccttggcggccactgggcggcccccgctgctgcccacccgagcttctcgttctcagcgtgcggccagtgaggacatgacgagtgatgaggagcgcatggtcatctgtgaggaggaaggggatgatgatgtcattggtgagcattgcagggcccagaatcttgcccaggacccagcaggccaaggctcagagggtgggcagaacttggatccaggcccctaggcccctttgttttcttttccacttggtttatggttgcatgtggccagttcaggccctgccgagtaaatccagccctgccctcaggaagcccccagccctgcaggaaatctggaggacagggggcatgaccagatcttcaggtgcagtgttaggggctctgtcctgcaggctcataggctcctgcactgggcagtgggcactgggcatgtgggcacagccctgggctgaggagtagccttcctggacagcactccctgccggtttggagcagagctgagatccaggctccagactgtttctcctgggtccccctgcatctagccccctccccatactgttccctccactccctcagctgacgatggcttcggcaccactgacattgatctcaagtgcaaggagcgggtgaccgacagcgagagtggggacagctctggggaggacccagagggcaacaaggtgagggcttgggtcacggtgctgtcccatcacactccctcctaagccatgggaatgtctgtttctcccgggcttgagagagggggagattaaggtccagagagggcaagctgcttgccccgtggggagttgggtcatagtcaggatgaattgaggccttcagctggcaggggtgcagccctaggctggcctggctgacaggctggatgggcatggctagggggctgctatcgaggtgtcggagtgtcctgacctggggtgtctcccttcctttcatgcagggctttggtcggaaggtgttttcacctgtgatccgttcctcctttacccactgccgccccccactggaccctgagcccccagggcccccggatcctcctgtagcctttggcaaaggctatggttccgccccatcctcctctgcgtcctcgcctgcttcctcctcagcctcggcagccacctccttctcactgggctcaggaaccttcaaggcccaggagtctggtcagggcagcacagcgggccccctacggcccccaccccctggggctgggggtccagcgacaccttccaaggcaacccggttcctcccaatggatcctgccaccttccggcgcaagagacccgaaagtgtgggtggcctggagccaccaggcccctcagtcatcgcggcccctcccagcggaggaggaaacatcctgcagacactggtgctgcccccaaacaaggaggagcaagagggcggcggagccagagtgccctccgcccccgccccatcactggcctatggggccccagcagctcccctgtcccgtcctgccgccaccatggtcaccaatgtggtgcggcctgtcagcagcactcctgtgcccatcgcctctaagcccttccccacctctggccgggctgaggcgtctccaaatgacacagcaggtgccaggactgaaatgggcactgggtctcgggtgcctgggggctccccgctgggtgtcagcttagtgtattcggacaagaagtcggcagcagccacctcaccagccccacacttggtggctggacccctgctgggcactgtggggaaggcgcctgccactgtcactaacctactggtgggcaccccggggtatggggcccctgcgccccctgctgtccagttcattgcccagggggcccctggtggtgggaccactgcgggctcaggagcaggtgctgggagtggccccaatgggccagtacccctgggcatcctgcaaccaggtgccctgggcaaggctgggggaatcacccaggtacagtacatcctgcccacgctgccccagcagcttcaggtggcacctgccccagcaccagcccctgggaccaaggcagcggctcccagcggccctgcacccaccaccagcatccgtttcaccctcccaccgggcacttccaccaacggcaaagtcctggctgccactgcacccactcctggcatccccatcctgcagtctgtaccctccgccccaccccccaaaggtgagacctgggccgggcagcactaggggaggggccatagtcctgtttggctcccttgtaaccttttcctttcttgcctcttaacttccagcccagtcagtttctcccgtgcaggccccgcccccgggtggctcagcccagctgctgcctgggaaggtcctagtgcctctggccgcccctagcatgtcagtgcggggtggaggggccggccagccactgccactggtgagcccgcccttctcagtacctgtgcagaatggtgcccagccccccagcaaggtgagggcctgcctttctctctacctgctggatgttggcccctgtaccccatcatttctttgtcttttttttcagtcttttctccttctccatgtatctggttctctgtcttgccatcttccgtgatgtctctgtgcatcctgactctctcaagtcctcagtgtctgtaccctcctccttctctgtgtccccacctctcactgtcatcttgcccatcctgttctcaccccaagttctgtgttccttgcttttgcttagagtcccacttgaggtcttggtcttcccctgccccagtctggggccacagctcaccctggcctatgggtgcccttctccacagatcatccagctgaccccggtgcctgtgagcacacccagcggcctggtgccgcccctgagcccagccacactccctggacccacctctcagcctcagaaggtcctgttgccctcctccaccaggtaattgcagctgagcccatactcagaggccagggaaggggtggggcggggccggcttacctcactcctccccatttcctctcctgcggcagaatcacctatgtgcagtcagcgggcgggcacgcgctgcccctgggtaccagccctgcgtccagccaggctggaacagtcacctcgtacgggcccacgagctctgtagctctaggcttcacctcgctggggcccagcggccccgccttcgtgcagcccctgctctcaggtgaggggcggcctggcaggcagtgctggggacccagggtggggctgaggcagtccgggccctaacttggtctcctgcttcttcttctctgtctttcagcaggccaagccccactgctggctcccggtcaggtgggcgtgtcacctgtgcccagtccccagctgccgcctgcctgtgcagcccccggaggtcctgtcataacagcattttactctggcagccctgcacccacctcctcagcacccctggcccagccatcccaggcccccccaagcctggtctacactgtggccaccagcacaaccccacctgcagccaccattctgcccaagggcccgccagcccctgccactgccaccccagccccgactagccctttccccagcgccacaggtaggtgtcagatcaacccagagcagagtgagttgggggacccaggggatgggctccagtcaggcctggctcagcaaacaattttctccccactagcaggttccatgacctacagcttagtggcccccaaggcccagcggcccagcccgaaggccccccagaaagtgaaggcagccatcgccagcattcccgtggggtcctttgaggcaggtgcctctgggcggcctggccctgcaccccggcagcctctggagcctggcccagtccgagagccaactgccccagagtctgagcttgaggggcagcccacaccaccagcccctccacccctgccagagacctggactcccacggcccggagcagccccccactgcccccacctgctgaggagcggaccagcgccaagggccctgagaccatggtgagcgcctgcaggccgtggggctcccactgccacttggctgtgcctctccattgacgtctttgcttttctgtcctactcttctttccatgcctgtgtgtctctcaggttaaagggtcccctctgtcccttctgcctgcctgtgttgtctcctctcccatctgaggcccctgtcttggccttcctgaggccgtgtgacagccttctcaaggggtctgctgggcgggctcagatccaactctttgtttctggcctttgccccagagtctgagctcagtgttcgccatctccctgcccatctccaccccaggccagcaaattccccagctcatcttcagactggcgcgtccctgggcagggcctggagaatcgtggggagcctcccactcctcccagcccggccccagctccagctgtagcccctggtggcagcagcgagagcagcagtgggcgggcagccggggacaccccggagcgcaaggaggcggctggtactggcaagaaggtgaaggtgcggcccccgcccctgaagaagacctttgactctgtggacaagtgagcatgggctggggccttggtggagcgtgttagggtggcgggagtgggagcagctgcaggctgaggcgggggaggtgaccctgccggccctccagcagggtcctgtcagaagtggacttcgaagagcgctttgctgagttgcctgagtttcggcctgaggaggtgctgccctcccccaccctgcagtctctggccacctcaccccgggccatcctgggctcttaccgcaagaagaggaagaactccacgggtaggcgagcattgggcacccagggtccttaggtggagggcagactggggccacctgcactgagtctgcttctgtttggccagacctggattcagcacccgaggaccccacctcgcccaagcgcaagatgagaagacgctccagctgcagctcggagcccaacacccccaagagtgccaagtgcgagggggacatcttcacctttgaccgtacaggtgccgtggtgggcagaactttgggggcctggggacctgcaagaggagtgggtctctggaaggcggttagagagtgagagaggtagggtgggtccatccaggctgggaggaagcacagcctgtcagtggtgggttctggagtctggcaggcccctaggttgccctgtgactgtgggcaggacccctctctgactcccctgtgaaatagaatgcagtgagggcttgggtgggcactcagacggtggcaggaaggccctgccgctgctgcagccttgccatgctgcctgtgccctgcacaggtacagaagccgaggacgtgcttggggagctagagtatgacaaggtgccatactcctccctgcggcgcaccctggaccagcgccgggccctggtcatgcagctctttcaggaccatggcttcttcccgtcaggtgagcctgtctcggagtcttggggtcactcgggtgggacttatctgtacatctcatcctgtgctccccaccgtttttctatctccagcccaggccacagccgccttccaggcccgctatgcagacatctttccctccaaggtttgtctgcagttgaagatccgtgaggtgcgccagaagatcatgcaggctgccactcccacggagcagccccctggagctgaggctcctctccctgtaccgccccccactggcaccgctgctgcccctgcccccactcccagccccgcagggggccctgaccccacctcacccagctcggactctggcacggcccaggctgccccgccactgcctccacccccagagtcggggcctggacagcctggctgggagggggctccccagccctcccccccacccccaggtccctccacagctgccacaggcaggtgagggacccctgagaagatgccaggacttatagtaccccctcaggacatggacagtatgtgggggcaggaaggttatctcctcccgggtaaagccatttcgtcctctccagtttggggcggaatgaggcctgctcctcttgtaaatacccccttccctcgaagctccctcccggtgctggggggcagctgaggggctgcaggggcagtctccctcctccaagcccctgtacataacctggagcgtgtgaccttcagagcttttcactttatgcaaaatggctcctgtgagggctgcaagctggagggtggtgcaggccttgggccacagggaggcgcctgtggaatagggggagttcatgcaccccttttttccccagaggggctggactcaggttagtttgggggtgggggctcctgcactttgccacaggcacggggagggttttctcctcaccccctctgccctcccaacttgggttgtactttctaagaaggtgattccccctgcccttgcccccttccccagaacaaaacatgttgatcatgtgcaatatttcttactgtgccgagaagccgcaatgagcgagattaaagctgtttaacacacctgtgtggctgtaggctcttaacagggagggctgttggttgtaccagtcctgtcctgagttgtcatggagcggtaggctttccatgaggtgggggcaacaattccagtaccactgcccccaacttcagaggaaccccataggccaggtccctgacttgctgtggaccagatggcccctctccagtttaggagcctgtgcgctccgggagcctcaatgcctgctggccctgttctcagccattggactgcgtgagtttggggaaggcctgaggcaagatgccactggatggtttaccctcactggctctggggtcattcgtactcaggaaacaggtcccaagaggtcctagcccagaggtggcagtgggtgggagggagcctagtctacctggaatacccttggtcctcagtgtgacccctgctgcccccatgtggcctgggcctgcactgcaactgggcttgaaggaacctcccctgggtgacacccctcctgctcagcatgtggacacagtgcccacctgaggtgacaagatacctacaccctgtgtggagggatgacaactaggagtgggagggtcaggacacctccacagaagtggcatctaagctagagatggagcaccaggaagttccagccagggcaaccgcatatgcactgggtcactatgttcccagaattcttgcctgagcttggtcctgtaggatagtgctggaaagctggtcttaactagtgtttactgattggtaacgcctgcctgaagcacactattgtgatagtggaaattaacctaaccacaagaatcacagtgccttaatggatcagtgatacctgccctgggcagaaatagaaccacagccaggcatggtggctcatgtctgtaatgccagcaccctgggaggccgaggcaggtggattgcttgagctcaggagtcagatcagcctgggcaacatggcaaaaccacttctctacaaaaaatacaataagctggacctagtggcacatgcttatagtagcagctattcaggaggctgaggtgggtggatcacttgagcctgggaggttgaagttgcagtgggctgtggtctcaccactgtactctagcctgggtgacggagagagaccctgtctcacacaaaaaacaccttgcagaactgcagggtcacagatcaggataaggactaatggtggtacccagatacccagacaggttcgaccataaagcaggaaacagcacactgaggaaggagagtttaatgttgtgggaaggcagcaggatgcttagggtgcgggctccagcaggggagcaccttggccctggtcttgggccagcagacgcagaagcagggagtgcagagcccggcaaacaggtgtgtagcccaggcggctcagatgcaggtaatcatacatgtcatgatggctgatggtgccatctgagtgcacaaagccagggtcggcatctaggaagtgggcccgagggtggccagccagtgccgcccgtaccagctcgttcacctgtcggttcttctcccgaagtgggttgggatgttggcctcgcggaagcaggccctgagcaggaacacgaggcgtagtaaggaaacaagcatttgagtatcttgttctctgtgccaacctgtcctccacccaccaccatgaagtttccagctgcagaaaacactagggatgggcaagtggggagggtgggagggtagttcctaaatatcacatcctagccctcatttagcaagagacttctgggttttaccctctttcgttttcttttttttttttttttgagacagagtcttgctctgtcgcccagactggagtgcagtggcgcgatctcgactcactgcaagctccgcctcccaggttcacgccattctcctgcctcagcctcccaagtagctgggactacgggcacccaccatcatgcccggctaattttttgtatttttattagagacggggtttcaccgtgttagccaggatggtctcgatctcctgacttcatgatccgcccgcctcggcctcccaaagtgctgggattacaggcgtgagccaccatgcgcggcctagcctctttccaagtatcacttagaaaaatgttgacattggctaggttcagtggctcacgcctgtaatcccagcatgatgggaggcagagctggataggtcgcttgagcccaggagttcgagaccaacctgggcaacatggtgaaaccccatctctaacaaaaatacacaaaaattagtgggacatgatggcgtgtgcctgtagtcccagctactcgggaggctgacgtgggagaatcacttgagccctggaagcagaagttgcagtgagctgagatcatgccaccgcactccagcctgggcaacagagccagatcctgtctcaaaaaataaataggccaagggaggttgctcacgcctgtaatcccagcactttgggaggctgagacgggtggatcacttgaggtcaggagtttgaggccagcccggccaacatggtgaaatgccatctctactaaaaatacaaaaattagccaggtgtggtggcacgcgcctgcagtctcagctactgtgaaggctgaggcaggagaatcacttgaacccaggaggaggaggttgcagtgaggccagattgcgtcactgcactctggcctggcaacagagcaagactctgtcccaaaataaataaataaataaaagatatcaacatcatggctcatgccaagggatcaatccgttttcagaagaggaaatatcctagctacctacaagtgatggagcctagatttaccccaggaatgcctgacaacttttggcctattcaaggttttttgagggtttttcttttgttttctggtgagacagggtctctgtcacccgggcgagagtgcagtagcatgatcacagctcactgttaccttgaattcctgggctcaagtgatccttctcctttagcctcccaagtagctggggttacaggttttgcgcaccatcatacccagctaattctttttttttttgagatggagtcttgctctgttgcccaggctggagtgcagtggcacaatctcggctcactgcaagctccgccccccgggttcatgccattctcctgcctcagcctcccaagtagctgggactacagacgcctgccaccacgcccggctaattttttgtatttttagtagaaacggggtttcaccttgttagccaggatggtctcgatctcctgactttgtgatccaccctcttcagcctcccaaagtgctgggattacaagtttacaggcgtgagccaccgcacccggcttttttttttttttgagacagagtttcgctcctgttgcccaggctggagtgcaatggtgcaatcttggctcaccccaacctccacctcctgggttcaagcgattctcctgccttagcctcccaagtagctgggattataggcatgtgccaccacgcccagctaattttgtatttttagtagagatggagtttctccacgtgtggtcaggctggtcttgaactcccgacctcaggtgatctgcttgcctcggcctcccaaagtgctgggattacaggcatgagccactgcgcccagcccatgcccaactaatttttttttttttgagacggagtctcgctctgtcgcccaggctggagtgcagtggcacagtatcagcttactgcaagctccgcctcccaggttcatgccattctcctgcctcagcctgccaagttagctgggactacaggtgcccgccaccacgcccggctaatttttttttgtatttttagtagaaatggggtttcaccgtgttagccaggatggtcttgatctcctgacctcgtgatccacctgcctcggtctcccaaagtgctgggattacaggcgtgagccaccgtgcctggcccgttttttagtttttcaatacccccaaagtcttaagccatccctgggcaaaaaaggctaattggtctcggagcatattctcaaccacagccactctgaagggtatagcaagctccaacgtgagattctgcctaaaagccactgctctatgtcaagctgcctagaactgtgccaactgtggctatatctgagggggtcccagaccactgccattcttcctttcccactctcccagcctctcaccagcaccacaacccgggcctggggctgtcgctcattcaccagttgcacaatggccttgatgccaccagtcacctgctctgctgtgtgtccgtggttgttggtgcccacccagaccaccacaatctgtggaaaaagagacatgaagcagcggtgagggggcagccaaaagatgttttagagccccacccaagccccgctcaccttgggccggatgtgttccagctccccattctccagccgccacagtacatgctgtgtgccgtcaccaccaatgccaaagttaagtgcatgcagaggagagaagagctcgcgccagatctgtgggcaagaagtggtgtgggcaagaagtggtaggggcacaagggcactgtccgcatggaccatccccctctgtccaggtgttaaccaaatgccattatggaagaaccttacttcatggaagcagtcttaaaattttacctggagcaaactccagcatggctgaacctcactttatagaaatctattagagtctctcacttattttattttattttatatttttgagacagagttattttatttttgagacagagtctcactctgtcacccaggctggagtgcactggcactatctcggctcactgcaacctccgcctccctagttcaagtgattctcatgtctcagcctcctgagtagctgggactacaggtgtacgccaccacgtccagctaattttttgtatttttagtagagatggggtttcaccatgtgggccagactggtctcgaactcctgacctcaggtgatccacctgcctcggcctcccaaagtggtgggattacaggcgtgagcccatggtgcccagcctatttattttttgagacggagttttgctcttgttgcccaggctggagtgcagtagtgcgatctcggctcattgcaatctctgcttcccaggttctggcgattctcctgcctcagcctgccaagtagctgggactataggcatgtgccaccatgcccagctaatttttgtatttttagtagagacaggatttcgccatgttggccagggtggtctcgaactcctggcctcaggtcatccgcctgccttggcctcccaaagtgctgggattacaggcgtaagccaccacaccctgcctagagtctctcactttaaaccaagccccaggctctgttgctcatgctgaggtgggcggactgcttgagcccaggagttcaagaccaacctgcgcaacagggcaaaaccccatctctacaaaaattacaaaaattagccaggtgcatggtgatgtgcacctgtagtcccagctactcggagactaaggtgggaggatcacttgagcccaggaggcagaggttgcagtgaacagagatcataccactgcacgccagcctgggtgacagagcaagaccctgtctcaaaaaccaaccaaccaaccaaccaaccaacaaaacaaaccaagccccatagaagcaagactcacttcatgaaaatccagtctgcttgagccatgcattgaatcaatggcattacagttgaaacttattttgatgaaacccattacagttggacatgctttgtggaaagatattattatgattgagtcctctttgtggagtgccattagagttgcccttcgcttcctgtaaagtgactatagctttgtgtaaacccaacagggctgcgcactacttaaagcaaacaagaaagagcctcactttaggcaagcctatggcaggaaagcctcattttaggtcttagtacattatacacaaatccaatctgataaaaccaaggcatacatttctttctcaatagaatgttgcaccttacaccaagattctcagagcctcgggctgcctgaggccaatctgggtactctcataatacctcacctggcctgggttctggtccagatgtgtcagcatggacacagggctggatggggcagggggagagggactgccctcacctcgcactggtgcatgagctggaccaaggagtccccgatgaagacgacttcgggttccttatctttgctgtcagccacgaaccgatggtgctgcgggagcgcgcgagagggagtcaatggcatgcacgctccagggcccgccccgccctgctcccttaggcagcgcctcctcaactgccctcagtttcccaatcaggtagtgagagtggcacgaaccagccgttctcctgagccaccccccgcgcccccggactcctcaatatcccaggtgggaacgctcaccagggacatccagcgcccgtcgccctgtacgtcctgcaccggcgtgggcttgctggctgggttctcctctccactcatcttggcgccgcagctcctgcaggatgagcgagtcgggtcggcccgggagtgttccgaacggagctggctccgccacgcccactcctacccctcgcggcaacaaaggaccgtcccaacgctagcacacccgcggaggacgaaggccgatacagggcgccgcctcctctccagggacggaagccttcacttaggaggtaggtggaatcaggaaccttcgcttcccccacgacggccgcacagtgggctcgcccggcgcttcccgctcgggccgctgactcccaggccgcgcacccggcacggggtggggggagggagaggcgagaccatccagctcccgaggcggggaggagggagaaaccacccaccggtcacggggaggggcgaactacctgaagagtcgagagtgggcggggaaaatctagccctctgtctagcaaatgggaagaaaccatttgctgtacagagtgaaatgtgcggaagggaccacctactgttgcgggggggggggtgacccattcacgtggtggggggaggggagcgagtggacgagtccattcttatattcccttgaaggggtggctcgaatgcacctggctgggggggacgctcctattttctactgatgtgggggacagaaaaggaagatgacaaaatgtgaaaattcgaggctcccttctaaggagccactctaaggccgcgccagggctttagtgagcctatctactcgtgggcttcccctactcaaaacaccgtgggtgtgtgtgtgtgtgtgtgtgtgtgtgtgtgtgtgtgtgtgttgaaatctaaagtacatatctttgcattcaagacatcacaggacccctactcaaaacaccgtgtgtgtgtgcgcgcgcgtggcataacatataaactacatatctttgcattcaagacaccataggacctgcttggagggtagaagaaggtgcagaaagagaaaggaaattagagacgcctccagggctcaggtccagtctggcgtccctccggcagatcatcttgcagatctgcagcctctacactctctctaaacccacaggccaactgggtatgtctgagctctgaaacctacatccatagccaaggccacctagggtcgcgcctctcccccaacgctgccccaaattaatctcagacctcagtgtcttctcagatctccctcttctctgggaccaggtggggggctcactccctgctaaacgtcctggtcatgttcttgtagcctcactccaggtgggaccttcccatgtattcattccttcgaggtggattgatactgagacagagatgagtgttattcattgtgtttatgttttcaatccactttcctggaactgggccgggcacacagtggttattccacaagtgcttgctgaatgagtagtaaatgagtgggtcagctcctgaccttgtcccaatgtgtttagggagacagatccagacacagaggtgtaggggtgtcaaagttgtgtttgagggagagacagggacctctggggaggaagaggagaaggactctgaggactatgggtttcctaggagtagtatctcagctgggtctgaaagataatgaagaatgggcaagcagaaagaaaagacacaggtaatcactttcttattaggtttggggaatatcgtggaatagcttgattttaaagtctgagggaggccagcatggaggctcatgcctgtaatcccagcactttgggaggctgacatggtcggatcacttgaggtcaaccagcctggccaacatggcgaaaccacgtgtctactaaatatacaaaaaaaaaaaaaaaattagctaggcatggcagcacacgcccgtagtcccagctacttgggaaggctgaggcaggacaattgcttgagtctgggaggcagaggttgcagtgagctgagatcgcgccactgcagcccagcctgggcaacagtggcccagcttgggtgacacagcgagactctgtcttaattacaaaaataaacaaacaaataaagtctgagggagccaggtgcagtgatgcatgcctgtagtcccagctactggggaggctgaggtgcgaggatcgcttgaacccagaagtttgagaccagcctgggtaacacagtgagaccctgtctaaaaaaaaaaaaaaaaaaaggctgggcgcggtggctcacgcctgtaatcccagcactttgggaggccgaggtgggcagatcacgaggtcaggatcgagaccatcctggctaacacggtgaaaccccgtctctactaaaaatacaaaaaattagcggggcgtggtggcaggcgcctgttgtcccagctacttgggaggctgaggcaggagaatagcgtgaacctgggaggcagagcttgcagtgagccgagatggcaccagtgcacttcagcctgggagacagagcgagacgccgtctcaaaaaaaaaaaaaaaaaaaaaaagggcaagtgcctgtagtcccagttagttgggaggctgaggcaggaggatagcttgagcctgggagatgaggtggcagtggcccatgatggtgtcactgcactccaggttgggtgacagagtgagtccctgtctccaaaaaagaagtcataatcagctaggcacggtggctcactcctataatcccagcactttgggaggctgaggtgggcagatcacttggcgtcaggagttcaagaccagtctgaccaacatagcaaaaccccatctctattaaaaaatacaaagattagctgggcaaggtggtctgcgcctgtagtcccagctacctgggaggctgaggcaggagaatcgcttgaacccgggaggtggaggttgcagtgagttcagactgtgccactgcactccagcctcagtgacagatttaaattccatctcaaaaagaaaaggaaagaaaagaaaagaaaagaaaaaagtcttaattatgccttcaagtcagtgatataagagagaattttttttttttttgatagagtctcgctctgtcgcctaggctggactgcaatggcgcgatctcggctcactgcaacctctgcctcccaggttcaagcgattctcctgcctcagcctcctgagtagctgggactacaggcgtgtgccaccacgcccggctaattttttgtatttttaatagagaagaggtttcactgtgttagccaggatggtctcgatctcctgacctcgtgatctacctgccttggcctcccaaagtgctgggattacaggcgtgagccaccatacccaaccgagaaaaaaatttttaaaaataaagtcttagaggataagttggagcagttcctgaagcaaagcttagtgagaaacaaagcttccaggcattcttcattcaccaggcccatttcaagttagacatattggtctagtttatccttctagcaaccaaatgaggaaggtagttttattaccaacccaattttacaggtcagaaaactaagtctgaccagttacaaacatttccaaggtcacacagcccagttgtgccattttgggcatttaaaccaagcctagctatgaatcacaacactacactaacttttttttgagatggagtctttctctgtcacccaggctggaatgcagtggtgtgatctcggctcactgcatcctccacttcccaggttcaagcaattctcctgccccagcctgctgagtcgctgaatatacagtcgtgagccaatgcatgtggcctaatttttgttcttttacagggtcttgccgtctccctcaggcgggcgtgatcatggctcactgctgcctccacctcctaggcttaagtgatcctcctgcatcagcctcccaagtagctgggcccacaggcaagagccactgcgcccagcttatttatttatttagagacggagtctcgctctgtcgcccaggctgaaatgcatctcggctcactgcaagctccgcctcccgggttcacgccattctcctgcctcagcctcccgagtagttaggactacaggcgcccgccaccacgcccggctaattttttgtatttttagtagagacggggtttcaccgtgttagccaggatggtcttgatctcctgacctcgtgatccgcccacctcggcctcccaaagtgctgggattacaggcgtgagccaccacgcccaaagctaatttattttttgtagtcagggtctccctatgttgtccagggtggtcttgaactcttgggctcaagccagcctcctgcctctgcctcccaaagtgctgggattacagacgtgagccaccacgcccggccaactgtataagttttctagggattatgtctgtggctgcttgggggacagctgtgcatgggggctaccatgacccttcttccctttggcacgcctggtctcaactagccctcgaaagaccgctgatagctatctgaaccaatcagcattcaggaagggggcggacctagtgaacctcacagccaattgagggctgggaggtgctgagaccaagaaagggagatttctgaaattgaggctgggaggggaggggctataaccggcgcttccctggcacgcgccgctaggtttccgtcctctcagagccacgaagccaaagggcatggaaagggcacgcgcatgcgtgtgggggagcccgaggcccggaacagcgccaggtgacttcgagagctggggtcaccgcggaaaagaagccattgcgccccacagctacgtgaagtgggaagggccggggttcgttggggcgagagaggtgcccttcccacaccctgctcctgccaaccgtaccccactcccttcactctgcccaccctgccctaccgcggctggccaccatgcttcctctcctaccctaggcccttcctttgtgatcaggccctgtccctgatcgcgcctctgtctcccttcctgttctcttgaggttttctcaggctttccagacttctcttgctgctctccctctcctgcttctctttctctactatctctttccactttctgcattcccctgtacctcgtctacccctggatttctccgtccagaatcactttctggtcccccaaatccctccaatctcatgaccccttcaccaccctccatcttttgttgttgttgttgttgttgttgttgttgagacagagtctcgttgtgtcccccaggctggagtgcagtggcgcgatctcggctcactgcaacctccgcctcccgatttcaagcgattctcctgcctcagcctctttgagtaggtgagattacagtcattcaccaccacgccggctaatttttgtatttttagtagaggcgaggtttcacatgttgcccaggctggtctcgaactcctgacctcaaatgatctacccacctcggcctcccaaagtgctgggactacaggcgtgagccactgcgcctggcccccaccctccatcttttttttttttttttttttttttttttgagatggagtctcgctcggtcatccaggctggagtgcagtggcgcgatctcggcccactgcaagctccgcctcctgggttcacgccattctcctgcctcagcctcccgagtagctgggactacaggcgcccgccaccgcgcccggctaatttttggtatttttagtagagatggggtttcaccgtgttagccaggatggtctccatctcctgacctggtgatccgcccgcctcggcctcccaaagtgctgggattacaggtgtgagtcaccgcgcccggctcaccctccatcttttaactgtttccccatgtccctgttcctaatagcctctctctgtttcctggcttatcttcccattagctgtgactccttcgacttcatcttacccctgtgattccttatctgaccaaaccttttccaatctctctctgctcacttattttctctcatcttctctctctcttttaagagacaaggtctcactctcttgcccaggctggggcacagtgatgcaatcatagctcagagtaacctccaactcctgggctcaagtgatcctcctacctcagcttccctagcagctgggactacaggtgtgggccaccgaatccagcttttttttttttttttttttttttttgagatagagtctcactctgtcactcaggttgaagcgcagtggcgcaatctcggcttactgcaacctccgtctcctgggttcaagcgattctcctgcctcagcctccagagtagctgggattacaggcgcgcaccatcacatacagctaatttttgtatttttagtagagacaggatttcggcatgttggccaggctggtctcgaactcctggcctcaagtgatctgctcgccttggcctcccaaagtgctgggattacaggcatgagtcaccacacctggcatcatccagctaatttttatttttattttttgtagagatgagggtctcactttgctgctcaggttggtcttgaattcctagcctcaagcgatactcccgcctcagcctcccaaagtgctaggattacagatttgagccaccatgcctggcctcatctggtcattctaaatagtattcccaccacaccccaaaacatctccctattcacttgttttgttttgttttgtttttgagatggagtctcactctattgcccagactgaagtgcagtggcacaatcgtgactcactgcaacttctgccttctgggttcaagcaattctcctgcctcagcctcctgagtagctgggattacaggcgtgcaccaccatgcccagctaattttttttttttttgagatggagtcttgctctgttgcccaggctggagtgcaatggcatgatctcagctcaccgcaacctccacctcctgggttcaagtgattctcctgcctcagcctcttgagtagctggaattacaggtgcatgccaccacgtctggctaatttttgtatttttagtagagatggggtttcactatgttggccaggctggtctcgaactcctgacctcaggtaatctgcctgccttggcctcccaaagtactaggattataggtatgggccactgcggctggccaatttttgtattttcagtaaagacagcattttgccatgttggctaggctggtctaaagtgacctggcctaagtgatcggcctgccttggcctaccccagtgttggtattacaggcataagccaccgcgcccagccctccctattcactttgctactccccttgacttatctgcatgctgatggccaccctatctttatattccaggacaccatggatacccagggaccagtctcccagccttttcagcagcctgagaaacctggtcgtgtccgtcgtcggaagactaggcgggaacgtaacaaggccctggtgggcagccgccggccattagcccaccacgatcctcctgtggccattcgggatccacctgtggtccctactgcctccaagctcgtggtcataacccagggccggctgagccgggagcaccggggtctcttcaaccacgaggtgaaatccctagatgttgcaaggctgcttagcagtgggaccctggtgccaggcagccccacactccccgccaagccctccccaagcccaggcagggcccaggaaccagccccacggtccagggacaaagagaaccaggtgcctggaggttcgggcccaggcccacccagttccccagagttgtctggcgtggggcagctgctggcagagctgcagtgtcagctgagtttgccacaggccttcccccggaggaacctgattcaggatgccagggatgccatcgtgcacaccttgcaggcctgtcatggttgtgtgcctgaccttgccctggtgcttcggggctgccagccacccttgccaggtgagcgtccctcctgcccctgtactcccctttcctttgtcggctctagctcagctagcctctatgcttctttcctctgtgccaggggccaagcctggggtctctgagagaaagatgacacccttctggattaatagccctgatcaagtcccagagcaggagaggcaaaggaagcaacaagggacaaaggagttcaccttccccatgccctacacctccagcatgcccactgcgcacagggggagtctggcaccgccaagaggtccctggccaccatactttccctcactgtcttcgccatctggaacagcctggggtcccccaacagcgtttgacttgttaaaaagcatctggctggtagccacgccaccccctcctcggccctggggggttggcctccctcagcccctgcctcagccttcatcacccctgttgccccgaacctctgtcctggactggagccccagccccccttccccactgcccagcctctcctgggtagtagcccagagcagtccggaagcctggtcttttccacccatgagactgtactgaggagaggctgaggctagggctggggacagatatcttgtactcccagtgacctcaataaagtacttttcatggtcctcttgattttcagtgagttgctgactcagaagagcagcttttcttagctctgagttctaggtccaagatggaggggaaggtactgttgcttgttaccttcatagggcctgaggagccagcatggtggggaaaattgggacttcaattagtccaacacatatgcccactgtggctaactgtgtacctgaccctgagctctggtgatgctggggctccagagtgagtgagacaaaggccttgtcctcatgaggctcccagtttggtggtcggcacacacaaccccagctccagtgattgtgtctaggagagcaagagaggtgcaggggctggggcagtccaaggagggagtgatggctgccctagtgaggagggaattcttcgtagaagagctgtgtttttctttctttctttctctctttctttctttcttttctttctttctttttccttccttccttccttccttccttcctttctttccttctttctttctttctttcttttttggagacagagtcttgttttcttgcccaggctagagtgcaatggcacaatcttggctcactgcaacctccgccacccaggttcaagcgattctcctgcctcagcctcccgaggagctgagattacaggtgtgcgccaccatacatggctaatttttgtattttaagcagagatggggtttcgccatgttggccaggctggtctcgaactcctggtctcaagtgatcctcctaccttggcctcccaaagagctgcaattacaggcatgagccaccgtgccctgcgaaccctctatttttcaagggtggtggaaacttggtacttgaggaaaagaacatttcaggcaaggggaacagcatatgcaagtcctggaggaggctgcatagcagatacagggccattttcactcagcaaatccctaggccatgctgggacctagagtaagccacatctgggcctgcccttgagcgcctcctggtctgtgaacacagggaacagtgtatgtgcaggctcagggcaggagtgacagatcagggctgaatctggcccacaggctttttttagtttcacccacgatatgttttaaatgttggaatcaattgcctactgttacaaaccaggcagtttgctttttttttttaaattgcatttctggcttctttcagaaggaaagaaaaaataaaaaaggatctggcagcagcactacaatccttcctggcaacaactggccaagtagcagaggccccctctttgtgggatccatgctctccattaaaaatgtttcacttatatttccagcttggccccttggcttagaaaatttgtaaaaaatggtattttgagcagcccccgttttctgcagtggagaaggatgaagctagaaatgtttgttggagtctgatcaggaaaatcaaggtgaagggcatggcttctactctggaaaagcctttctagggcttgctgttgtccactgggaaaccatagggttgatatctgcatagaggggactgggctaggagatcatagggctgaatgacttggcccaggtcttatggtggacaagtgaaaaagtaggggtcaggctgggatttgaatgaacccaagcaagttattttaacttggatctgaaacatgcttttggctatctcacactaccacctctgtctctcacagcaacccagcttcacagcatggtaagcagtgacaggtcatggtcaggcagaggggtacggtggttatactgaagcctccaccaccaccatgtggtgtaacaagtggcttcccctctctgtgcctccatgggcactttgcagggtgcatcagatctagaacgctggcaactccaggatggacacagctggggatggctgcaatagaggtggtgatgggcaatcaaagacttgttggccaggcgcggtggctcacgcctgtaatcctagcactctgggaggccgaggtgagcagatcactttaggttagaagtttgaaaccagcctggccaacatggtgaaaccctgtctctactaaaaatacgaaaaaatcatccgggcgtggtggtgggtgcctgtaatccctgctactcaggaggctgaggcaggagaatcgcttgaacctgggaggtggaggttgcagtgagccgaggtcgcgccactgcactccagcctgggtgacaaagcaagactcgtctcaaaaaataattagtttggggactacattgaggggaggccaggacagagcatgggtctggggatccggagaaggcagtctggaggaggcatggctttggaagacgtgagttcagtttaggacacaggaaaccataggtatctacgggactccaggaggggagggctggggcggggtgacagaggatgaacgtccccctcccacgcggagaagataggagtcaggttgggccctcttggaggagggggcagggagcgcggcgcccggcggcccctttaatcgggggcgcgcgctggccagcccgcgcgctctcgcctccattgccgggccagtgcgggagccggagcggagccggggccggagcgggcggaatggagcccctgcgcgcgcccgcgctgcgccgcctgctgccgccgctgctgctcctgctgctgtcactgcccccccgcgcccgggccaagtacgtgcggggcaacctcagttccaaggaggtgagcatgccgagccctcctctgcggcccgccggcccccgggggacgcaagggaggcgaggggagcgggtaccgcctcgccccctgccgcccctcctggcggactccgggagcctcgggggagtggggccgagggcgatgggggactgggccagagtcgaggctaaggggagccgtagggtcgcggccagacctgggggttgtaggagggacgttgaggtcagagctgagcggggagggggagcgggttgggagagtcagagtttgggaagggtggtgcagaggtggtgctgaagggacagcacttttcactcagcagagagccccgagctcgccgccacactcccgctcaggaccgggagggggccgtttggaagattcccccgcgcgggatggtctttgggagcacggggtggggtgcaggggagtgtggatattgggggaacggggttagatattggccaggacatgaggtggccaggatgagcatctggcccctaaggtctttctccccagaaagatcccgggaaatgcagggaggagtgtttgaatggaggggaggaaacttgggggggcaatggagggagaaaatcagggcggcaggaatcctggacccacagtgacgggatcagggaaggagtttggaggtgacctggtctccttctagtacttgggaagccaggtacctggggggtagggaagaaaagttgggggtctatggagtaaagagttcttgaaggactcagcggagggtcagactgggcccctttttcaggactgggtgttcctgacaagattttgtttcctctcggattacggccgactggacttccgtttccgctaccctgaggtgagtctcccccaacactcgccatgctgaggctgggtacttcccttggcctccaaaggcacaggctgccccagctcccggtccccaacatctctggtctgcaggccaagtgctgtcagaacatcctcctctattttgatgacccatcccagtggccagccgtgtacaaggcaggggacaaggtgagggctgtgaagagggcatagggggagaggggagaaggtcgttgctggccgggggagtgaccctgtccctgccttccccaggactgcctggccaaggagtcagtgatccggccggagaacaaccaggtcatcaacctcaccacccagtatgcctggtccggctgtcaggtgcaggctcagcctgggggagtgggcaggtgctgaaggatgaagccttcggggcatcaaggacaggcttcagccttctcgtttgtccccaggtggtatcagaggagggaacccgctacctgagctgctccagtggccgcagcttccgctcagtgcgtgaacggtggtggtatattgcgctcagcaagtgtggggtaaggggctggggtggccacctggaccaccttctctttgccttcctgccaacccccaacttgcccagggccccccttaggcctccctaccccccacagggtgatggattgcagctggagtatgagatggtcctcaccaatggcaagtccttctggacacgacacttctccgctgatgagtttggtgagcacgtggggacctagaaaccaggctctctgtgggacaccagagctgggtgcccactgaggggacatccacctgaatgaaccttactcctcctaccaaatcggcagggatcctggagacagatgtgaccttcctcctcatcttcatcctcatcttcttcctctcttgttactttggatgtgagtctggcacatggggtgtgggggaagagataggagggagcagggttgggggaggtgagctgctctccctttctgcctgtggacagcctttccctaccttgcttcctagatttgctgaaaggtcgtcagttgctccacacaacttataaaatgttcatggccgcagcaggagtagagggtgaggttccgtgtcccaacttttgggttctgaaagagaaggcacttggggccagacacctgggcctaagaggaatgcctgggggcctggactcctgggtcctgggggaggaggggctgggggcctggactcctgggtccaagggagaagggcctgggggcttcgactcctgggtcctgggggagaaggggctggagccctagttcctgggggaggatgggctggggacctggacccctggttcctgggggaggagggggtgggacctgacacccctgggtccttgagggagtataaaggccggaactaggctggacacggtggctcacacctgtaatcctagcacttggggaggccaaggtgggcggatcacgaggccaggagttcaagaccaacctgaccaacatggtgaaaccctgtctccactaaaaatacaaaaattagctggacatggtggcgtgtgcgtgtaatcccagctactcaggaggctgaggcaggagaattgcttgaacccgggaggtggagattgcagtgagccgagatcacgccactgcattccaacctgggtgacagagagagactctgtctcaaaaaacaaaacaaaacaaaacaaaacaataaaggcctgaactcctgagtctgggggaggaggggctgggagcctggactcctgggtctgagggaggaggagctgggggtctggacccctgggtcctggaggaggagggtctgggggcctgagcccctgggtctgaaggaggagggggtgggggcctggacccctgggtctgaggggggagggggtgagggcctggacccctgggtctgagggggtagggggtgggggcctgggcccctgggtccttggggagcagggttgggggctggactccagattctcctagcaggtgagtcggggtagaaggtctggagtcctaagggaggaggcgggattcagactgcctggatggtagtgctagagaacagtgatgccccagagctgctttctatcctttcttatctgcccatcctcccctcagtcctgagcctcctatttttctgcatctactggggtcaatatgccaccgatggcattggcaacgagagtgtgaagatcttgggtgagaatgaagctgggtggggagagggtggagcccagggctcaggttgggcatcaggtctgagcctggctctgagccgccccctcctcccttctcccagccaagctgctcttctcctccagcttcctcatcttcctgctgatgcttatcctcctggggaagggattcacggtgacacggtgcccgggcagggcgtgctcgtggggcggctggtgggggagcagggcaggggcagggttggggggctgggtgcatcctcctccctgacggcccccaccctgctgtctcccctcatggcctgctgccaggggccgcatcagccacgcgggctccgtgaagttgtctgtctacatgaccctgtacacgctcacccatgtggtgctgctcatctacgaggcggaagtgagtccgactggcccctggccgggccctgccttcccctgcttttggcgccgcctcccccttgacctgtctgctcgcccttgcccacatcctgctcctgctggctcgctctctctcccactcttcgattttctgctttcccatctgtctaagtgattcctcctctcttcaccatcccgcagcagctttctttctcctccctctgtctctcactgtctgtcacatttgtgctcaatatcgtgactaagagttcaggagtcacacagacctggattccacaccagctctcccacttcctagctgcctgaccttgggtgacgacccctgtctctgggcccattttcttcttggaaaattgggaggatcttacctaccccatggagcccctctaaggctttctatcgtctgtatggctttggccaaagggcttccctcttagccttagtttcctcttctgtgagatggagcagtaataagacctacctcgttgagtagatgctgatggaaaaactcacacatgagaggggtttagccctgtgttgagcaaacagtaactgatttattctcttcctgtctttttcaccctctctctctacctcaatatgcttctgtctccgtgcctggctctcctgttgcttgtgttctgaccgagtacctctgttcccaagtgcccaggggtggggtccggggaccctaatagaggggaggaggccaggctgtgatggaccctctcctgcgggtctagttctttgacccaggccaggtactgtacacgtatgagtcgccggccggctacgggctcattggactgcaggtggcggcctacgtgtggttctgctatgctgtgcttgtctcactgcgacactttcctgagaagcagcctttttatgtgcccttctttgctgcctataccctctggtgagaattggtgggccccagcctgtccctgcctccctctcggggctccccagaagtggttgccccccatctcagaccctccatagtgagggagatggacttttcactcaggcagctgttgcccagaatctgccacttactcactttgtgaaaaattactttcacaagaagtgcatcaggtttacccataaaacaacaggatctcgccaggcgtggtggctcacgcctgtaatcccagccctttgggaggccgaggtgggcgtatcacaaggtcaggagattgagaccatcctggctaacatggtgaaaccccgtctctactaaaaatacaaaaaaattagccagccatggcagcatgcacctgtagtcccagctgctggggaggctgaggcaggaaaatggcgtgaacccaggaggcggagcttgcagtgaaccaagatcgcaccactgcactccagcctgggccacagagcaagactccatctcaaaaaaaaaaaaaaaaaaccaaacaggatctcctcaggccgggcgtggtggctcacacctgtaatcccatcactttgggaggccaaggcgggtggatcacctgaggtcaggagttcgagaccagcctgatcaacatggtgaaaccccatctctaccaaaaaataaaaaaattagccgggcatgctggtgggcacctgtaatcccagctactcaggaggctgaggcaggagaattgcttgaacccgggaggcagaggttgcagtgagccgagatcacatcattgcattccaacctgggcaacagagcaagacttcatcttcaaaaaaaaaaaaaaacaggatctcctcaaagggatatcttgagcaagcataggccactatatgagggccgagtgtctggcacatagtaaatgttcagtaaaaaactattgtagactgggtgcgctggctcatgcctgtacccccagcactttgggaggccaaggtgggtggatcatttgagatcaggagttcaagaccagcctggccaacatggtaaaaccccgtctttactaaaaatacaaaaaaattagccaggcatggtggtgcacgcctgtactgccagttactcgggaagctgaagcaggagaatagcttgaacctgggagactgaggttgcagtgagttgagatcgtgcccctgtactctagcctgggcaacagagtgagactccatctcaaaaacaaacaaaaaacaacaacaacaaacaaaacaaaaaaacacccaaaactattgtaattattatcgttcaccataacatagcaataaggttggcagattctgagccagactgtccgggttcagatctcagctctaaagcttatagatgatgtgacctcagacgagcccattaacttctctctgcctcagtttcctcaccttttaatggggatggaaattttatctgcttcatagagtcactgtgagagttaaatgagtttatatacatcaaatgcttagaaacaggcctggcatgcaataagtccttacttcttattatcatttgttcattcattcgtcaaatatctatttttttttgtttgtttgttttttgtttttgagacggagtcttgctctgtcgcccaggctggagtgcagtggcacgatctcagctcactgcaacctccgcctcctaaattcaagtgattcttctgcctcagcctcccgagtagctgggactacaggcgcatgccaccacaccctgctaatttatgtatttttagtagagatgtggtttccaccatattggccaggctggtctggaactcctgacctcaggtgatccacctgccttggcctcccaaagtactgggattacaggcataagccactgtgcccggcctgatttcttctttttttttttttttttttgagatggagtttcgctcttgttgcccaggctggagtgcagtggtacaatctccgctcactgcagcctccgcctcccaggttcacgtgattcccctgcttcagccttccaaatagctgggattacaggtgcatgccaccacacccagctaattttgtatttttaatagagacggggtgtcaccatgttggtcaggctggtctcgaactcccaacctcaggtgatctgcctgccttggcctcccaaagtgctgggattataggcgtgagccaccgtgcccgggctgtctattgatttcttatcagatgccaggatttggggtggtgtggaactgagttaaattgaacctccttcttgcccctcagaatttcccagtccagtcctgccccatttcagtctctggcttctgaaggtcacactggcttccctccagtttgggacctgcctggggtctgcgtgtgtacatggcaggcgaggtggggctatagggtggggtggaggacaggagcagtgtctctactgacccaatacttccccttcaggttctttgcggttcctgtcatggccctgattgccaatttcggcatccccaagtgggcccgggagaagattgtcaatggcatccagctggggatccacttgtacgcccatggcgtgtttctggtgaggatgggcatctgtggggggtggaggggaggacccgagggcagaagatgtgtgaggctcctacacctgatctgctggacctcctgttctgaggtcttgatccattttccttttagtcattctccctttattgagagcctgcttggttcctgcagtctcctctattgtgctcctcagagtccattttcttctctttttttttttcgagacagagtctcactctgtctcccaggctggagtgcaatggcttgatctcggctccctgcaaactccgcctcccgggttcaagtgattcttctgcctcagcctcccgagtagctgggattacaggtgcccaccaccacatgcagctaattttttgtatttttagtaaaggcagggtttcaccatgttggtcaggctagtctcaaactcctgacctcaggtgatccacccgtctcagcctcccaaagtgctgggattacaggcatgggccacctcgccgggcccatgcccattttcttctgttcccctctccaactttgtgtcctggcttctttcctcaacccccatcctctctctttgccctcccttcccatttccattcctgaccctgtgtccccagattcttccatttctcttttgtatccccactgccttccccaccctccttgatctctccactctccccctgcccctgcccaaattctgccatcacaggccactgttcaggaagaagcatctggggtggcacagggtgaagcttttgggctcctgggtcggcaacaggagggtacagcaccacatcttttttttttttttttgagacggagtctcactctgtcactaggctggagtgcagtggcgcgatcttggctcactgcaacctccacctcccaggttctcctgcctcagcctccggagtagctgggactacaggagcacgccaccatgcccggttaagtggtttttttttttttttttttttgagacggagtcttgctctgttgcccaggctggagtgcagaggtgcgatctcggctcactgcaacttctgcctcccaagttcatgccattcccctgcctcagcctccctagtagctgggactacaggcgcccaccaccacgcctagcaaattttttttgtatttttagtagagacggggtttcactatgttggccaggatggtctcgatctcctgacctcatgatccgcccgcctcggcctcccaaagtgctgggattacaggagtgagccactgcgcctggcccccaccacgtctattctttgccctggttcacatcctatctgacattcttggtgacagttctaatattcattaatttattcatcaattgttcactgggcacctgtcttgaaccagtctgtttcattctaggaacatccatatgcatttactcctgccctcttgtttaattgtcagagcagctccaggagagggtggataattgacattgttcccactacacagagcggggaagctaaggcccagagaggagaagtgacgtgccagggctccgtggcctttggcggcaggcaaatactttgaaccctatccttctccagcagaccacaaggtctgaaatgaaggggaaccagaaagggcaacaggcatgacccagtgtcccagcttctgactccagggatctacaacgtaccccgtgtagggagtgggcccagccaccgagggaggggacaggtccccatcctttgcctcagaggctgacataggtacagactcgctcaccttcccaggctggtctatcctgaagctctgcaggaagtcagaaagggacagaaagaggagaaatgctgagaacccatcatgtgctgggctctgcaccagtggttttcatttccaccctctcatctttccaagtaggcgctacagtcccttttccccacagcgaggctcagggagtttaatcaacatgccccagatcccatactcagtgagctacagatcccagaggcgggatgcaggctcagaacggcaagcacagcgcccttcctgctgtatctcagccagcttccttcctaaggatgctcacgttagctcagcacagctccacctgggtatctcaacgctcattgctttcagctccttgttcatttttttcagcacaaccttagaagagctgtgttaggtttccgggatatggcggtggagtcacacccagtccctgccttcacagcctatcagactaactggtaccagacatccctacattccaccaatatttatttatttatttatttattttaaattttttttttttgagatggaatcttcctctgtcgtccaggttggagtgcagtggcatgatctcggctcactgcaacctctgcctcctgggttcaagcaattctcctgccttagcctcccaagtagctgggattacaggcgcaccaccacacctggctaatttttgtatttttagtagagatggagtttcaccatgttggccatgctggtctcaaactcctgacctcaggtgatccgcccgcctcggcctccccaagtgctgggattacaggcgtgagccatggcgccttgcccaccaatatttactgaaggcttatatgcgccaggcatggttctagaaggtactagggactcagtagggaacagaagagtctggttcctgcctcatcgagacattttagagtctattagttgctgtccaattgaactttctgtatttatgaaaatatcctattacctgcactttccaatatgggagctactaaccacatgtggctgttgagcacttgaatgtgggtagtgcatagtgagtgtgtagtgaggagtgtgaccaaaatttaaattttattttgattaaatttaagctacatgcagccagtggctatcatacagtgcaggacgctgaccctaagcaatcagtgacagctcagtgatcaggcctctgatggaggaagcacaggccgagttttgttgaagggaaaaggtgagggtccagggcatttggagagcccagaggggacgcctaatccagtgtgaatggcttcagggaagtgtggtggatgtcaactgaaagggaatccttcggaccccaagtttatggggacagcctccggcctgacagtgcctctcacacctgctcctggccctggcctcagatcatgacccgcccatcagcggccaacaagaacttcccgtaccacgtgcgcacgtcgcagatcgcttcagccggagtccctggacccggagggagccaatccgctgacaaggccttcccgcagcacgtctatgggaacgtgacgtttatcagcgactcggtgcccaacttcacggagctcttctccatccccccgcccgccacctccgtaagccccgcggccccagcgcccgaggagctgctggcgccgcccctggagtacctgaccccgctcccggccccgccgccgcccccagcgcccggacccctgagccctcctcctgcctttcgcactccccgcgccccaacaccgcgccgcgaccgtcccctggcgcccgcgcccaccctgcctgactgggttctggcgctgttgcgcacacccccgcagactccctgcgccgtgcccccaccgcccgccttccgcggctctcccccagctccccggccgccgccggagttcgccccgcgcgccccgacgccgccctttgagtacctggccccgctgcccaggcgccccgccacccagtccttccctgactgacaacgtgcgtccacacctggggtggaagggttctccgggggagggggacgggccttcggggccgcatctgccccccgagggtcccggacggcctctgaccctgacccccctcccaggccgggaagcaggtggaggagacagcggtggcggcggcggtggccccgaggggccgcgtggtgaccatggccgagccgggcgcagcctcccccccacttcccgctcggttccccaaggcggccgactcgggctgggacggcccgacgccgccctaccagccgctcgtgccccagacggcagcgccgcacaccggcttcaccgaatacttcagcatgcacacggccgggggcactgcacccccggtctgagcacccctgcccgcccctgccccatgggccatgaccgggccccggccgggctccggacccctgctttatcccggcccgagagctcgcccatccccggccttcccgacccttcccaccccgcgcgcccaggttgggtacgctgcgtcccgcccccctcccctctgtgccaaacggtcccgcgggagccgctctccccgtcccctccctcagcccctgccccgagcggcgccggattctgggctcccgctgttccgtgacctccggccccctggcccccttcgagacctctgaccccgctggactccggaacacccgtggtgaccgccgggaccctgcctgtgactctccaggactctgcgaccccgggatggatattgcgatgctggtctcgaccctgaaaccctccctcggatctgtgacctcggacccgtactccatctgccgcatctccattccgggggccttccctcgggtccctggcagaaagacattttaccccttcttgccaaaataaaaaaggattcgtttttatctataacatggcttcttttgcatcttgatggtgttcagcggcggggctgagccagaactatgtcaggctcgggacctcagtgtgtccatctgtgaaatgggaatttggaaccggaggcaggggcctgtataacctgatctttatgttgccccagaatgtgggaacattgaagatgatcaaacatctagcagggtcttgcaccgctcctttatttttgccttcctttcctcactcagaggtagaggcgccctccagtggcccatgctttgctgaaccacaggcacccagagtttgggttacgatcttagcactgcgcatatgtgtatttctctccctccaggaggacgctgctgcgcatgcggttgggaacaaatgggcggggatttccccggaagtctccctttatggagggttggggttgggcgctccgcagtcctcccagggccgctctgaccggccgctctgtaacttctcgcctcctcttcgccgtccctcccacagcggctgctcggctcccgccccctcgccctcccacagcgggtcttcccgcggccgctctggcccaagcgtcccctcgtctctctgatctggcccatccggcttcggagggaggcgagggtgggtgagcaaagggattgggtctgtggggtccaggcccgaacccctgaagacgggctccgcccccggcacccgctcgcgccccgcccccggctggaggagtctctcctggaccatccgaacctagcctgtcccggcccgcagcctctatggaggctcctgccgggccgtagagcccttcgccccctggggacccacccgtctataaggtccgtttggcctgcagcagcctgagtccgtaatgctgggcactgttcatgggatcggccccctatggagccctgtgtctataggggactcctacggtccctagggttcggccccgtccataatgactccatatacagggccttccatcgctctatagggctcagccctcggcttccagagcctgtcagcagtggccgtacccttcgccgggactgccgggtctccgggacctcttcgatctacaaggtcatgttatgcctatagaggtcgcatttgcagggcctcaccccgggtagagggtcctctccaggtttttacggcctgtccccgctctaagggtcagtgcaggaggcggcgatggccctgggcaaggttctggccatggcactggttttggccttggccgtgctggggtcgctgtcccctggggcccgggcgggggactgcaaggggcagcggcaggtgctgcgggaggcgccaggcttcgtgacggatggtgcgggcaactacagcgtcaatggcaactgcgagtggctcatcgagggtgagtggggccgcgtgggtcactcactaattcgctggtagttcattcatgtgtgcattcatccactcaccacattcccagagctcggttctggtccaggccttttgctctaaaatgcctgacacccagggttgcagccaacctgggccctgccctggaaggcctccaagtctggtgggggagatgcacctacacccagatttacaattacaagacaggagcatcagtgccgggccttctgagtaactgttaagaactcagggtctgggtccaatcatttggctttgaatttggttctactactactacttttttttttttttttttttgagatgggggcctcactctgtcacccaggctggagtgcaatggtaccaacacaatttacttactgcagcctcgacctcctgggctcaagtgatcctcccacctcagcctcccaagtaactgagtgtgtagagacagagtctcaccatgtcgcccaggctagtcctgaactcttgggctcaaacgatcctcgcacctcagcctcccaaagtgttgggattgtaggtgtgagccactgtgcctggcttcttattattagctttgtgactttgagcaggtggttttctttctctgaggttctgtttccttcccccacaaatgggataacaacagtactcacctcatagagttgttggaatgaaatgaaaacaggtatttaacatgcctgatgtgtggcatatagtaactgttcaataaatggcattaggattattgttgttgttatttgtgaagtacttcaataaaagcatttttcttcagtcattcatgtgccagacattatgtttcccattggacatagcccagactgagacagctccagcaatccctggtgacttaggtcttggagtctagttggggagacaaacacattaatagtgagagacaagagtggtctttgatggaggaaccccagaggcctgggagagcccagagaaagtgcctgatctggggccggggagaacagagaggcttcctggaggaggaaatgtctaagctgagacttaaaggaccaataggaatctgtcaggagtgggaggaaaggccccagccctacccttctgggctcccagtcagtgggagagacaaacccactccgaggctgtttgttttccttttccacccaataaactcctatgcatgcctcagaaccctgccccagtggctctttctctgtgaagacatgtggcttaacctggggtatagctgagatcagaggcatctgtacgagggagcagaagggcattccaggcaagaatagctgtgcaaaggcggggaagcgggagagtgatgcttttgaagaactagaaatccagtgtgttaaaacatagaatactggcagggtatggtggctcatgcctgtaatcccagcactttgggaggccgaggccggcagatcgcctgaagtcaggagtttgagaccagcctgggcagtatggtgaaaccccatctctactaaaaatacaaaaattagctgggtgtgatggcgcgcgcctgtagtcccagcttctcaggaggctgaggcacaagaatcacttgaacctggaggttgcagtgagccaatattgtgccactacgctccagtctgggcggcagagcgagactccatctgaaacaaaaacaaaaacatagaatacaagacaacgaatgagccagaggctgcagggtgggaggagccagcaggtgtagggctctgtgattttgagctgtatcctgagggcaatacaggggtgaaagagaagttgaaaggcagtacctgcagaagcccaggaaggcctcacagagtagtggatgtaaaagctggcctccagacaggggaggtcctgggcaaaggccagaggtgtgacagagcctggatcatgcagggcctcccttgggaggctgtggagctttgtctttgtctgggggctctggggagctatggaagggttttgagcagggagaggacatgatctgatttatgttttagaagatctctctggctgctgtgtggggtatggatgaaggcctgtttctcagtgatagcatgtctacctgttcccagcttgggggccattcctgtcaagctagtgggatgagaacagaataggaagtgtgtgtgtgtgtgtgtgtgtggcgaaggggtctgtgtgctggatataaatcactctctggccttaaagagtcccagactggttaggccaggtgcggtggctcacgcctgtaatcccagcactttgggagaccaagtggggcggatcacctgacgtcaggctttagagaccagcctggccgacatgaagaaaccccctctctactaaaactacaaaaattagccctgcgtggtggcgcacatctgtggttccagcctgggtgacagagcgagactctacctcaaaaaaaaagaaaaaacgtctcagactggttgggaatggtggggctggacacagatattcagcccccagtgtgttcactgagacagtgctcagggctaagaaggaaagtggaggggtggggtggatgtacctagggaggaaagaggactgtgctgcagataacagagcaggagccactaaaatagggttctgaagcatgcataggagtttattgagtgggaaaagggagcaaacagcctctatgaagacgtgagggtggctggagtgtctcaggatccccatctaggtttgcctggtcttatggcacttttgactgggaggtaatgagagccagaagcaggggaagaggggccttgaatgtcacactgagcagcctggccttccccttggggttgatgggcagccacaggaggttttgagcaggagtagggcattgccctcaggttgggtgtggggcagactggagacttgatgagctgatctggcaagagaggatgagttcctaactagggcaggggcttagaggggtggagaggtgtagacagtgcaatcgatgtttgtggagtttcacctataagacttggggaccaactgggtagatgttggggtgagggaggaggctgggagacctccagatcccccttgatgatcttctgttcttaccaatgcctgtcacttcttacctataagaaccaacatcttcctctatctattataaaataaacaaccagccaggggcagtggcacatgcctgtaatcccagcactttgggaatctgagatgcaaggattactcgagcccaggagttagagactagcctgaacaacatggtaagacactgtctctacaaaaaaattacaaaagattagctgggcttggtgggtggtggcatgtgcctatagctccagctaccggcgaggctgaggtgggcagatcccttgagcctaggaggctgaggtctcagtgagccgagattgcgctgctatactccagcctgggcagcagagcgagaccctgtctcagggaaaaaaaaaaaaaaaagataaacaaccaacctactaacttttgtattatgttcatactttatctagtcctagactttttttttccgagagagaatcttgctctgttgcccaggctggagtgcagtggcttgatctcggctcactgcagcttctgcttcccaggttcaagtgattcttgttccttggtttcctgagtagctgggattacaggcatgtgccaccatgccgggctaatttttgtatttttagtagagatggtgtttctctatgttggccaggctggtctcaaactcctggcctcaaatgatctgccctgggattacagacgtgagccaccacgcccagcccagtcctagtccttataacatcctcatggataagaggcatcctgcttttgagcaggagggagtttgggatcagatttctgtctggagtggtatgggggttgggtggaaacagaagaccttcaacttagggaagaacttggggaggcagatggtgagctggcctccagcaggcacttaacaaagatgtacttgtgattccagaaacagagctttatagtttggttgaggctggtaagattctgggaggtctggttgtgtggccgtgctgaatggttcttctgcattccccaaagcatgggtggggtctgtgtctgatgtcttgggggctctggttagagcctgagggagagcttccagctttagtattctgtcttttatgtatttcttcatttcatcatccagcatttcctgagcctttgccaagcccgggtctgggcaatgctgcagagggaattaggtccacatccaggccctgctctatgggccttgtaggctgcagggagacagacctggacatagatgttcctggcccagaggaatgaaggttataatgggatgtgagaaccctggagagggggcatctaacccagctagggggcatcaggaagaggcctggtggtgggaagggataatatgttgcagacagagggagaagcttgtacaaaggcccagctcccattagagctgtaagcagtggggtgatttgagacaaagcgagggtctgaacagcaggttagggacctggactttctcctagggtggtagggagccatgcagggctttggggcaggggagggacggggccagatgttgagttgggaagatcagagactcatgtcaggggaagaaggaggttggatcagtggttctggtgagacaggatgaggccgggcagccagggcacactctggctctaagctggcaggctggagtcatcacctcgttgaatgttcaccccagcctttgtgggtggggggaattatccccattttacagtcatggaaactaaggctcagagagcccatggaactggcccaggatcacccagccattggcagtggtggctgagtgtctccaggatccagataggcacactgagggtcatgggggaaagggctggcccagggtcctccagctggtcatgggcagagccagagccagagccagagcctaggcctcctaatttccctcacccagaggactcccctgagctgcctgttcagaaggcttctcatgtgggatgtggaatgagagaggctacctgaactaggactggcagagaataagacagtgacagtgttaggggtagtggcactctccacgatatgtgggccccattgtcaacatttcttttttttttttttgaaacagagtttcactcttgtcgcccaggctggagtgcaatggcatgatctcagctcactgtaacctctgcctcccgggttcaagaattctcctgcctcagcctcccaaatagctgggattacaagcatgtgccaccatatccagctaattttttgtatttttagtagagacggggtttcaccatgttggccaggctggtctcgaactcttgacctcaagcgatccacccaccttggcctcccaaagtgctgggattataggcgtgacccacggcacccagcctcttttttttttttgagtcccctctgtcgcccaggctggagtgcagtggtgcaatcttggctcactgcaacctctgcctcccgggttcaagcaattctcctgcctcagcctcctgagtagctgggacttgcaccaccatgcctggctaatttttgtatttttttttagtaagagacagggtttcaccatgttggccaggctgttctggaactcctgacctcaggtgatccacctgccctggcctctcaaaagtgctgggattacaggcgtgagccacccaccccactctgttgtcaccatttcgtgtgcattattgctcctcatgaggttgcagtcagatgtcagctggggctgcagtcagctgaatgttcaccttggctggacatccaggaaggtccctcccagggctggcagttgatgctggctgtcagctggaagctcagttgggactgtcagccggaatgcctgtgtgtggccttttcttgtggctttggcttttctttgtttttttttttgagacgaagtctcgctcttgtcccccaggctagagtgcaatggcacaatctcggctcactgcaacctctgcctcccaggttcaagcaattctcctgcctcagcctcccaagtagctgggattacaggcacccgccaccatgcccagctaatttttgtatttttagtagagacggggtttcgccatgttggctaggctggtctcaaactcctgtcctcgtgatccgcctgccttggcctctcaaagtgctgggattacaggtgtgagccaccgtgcccagccggctttggcttttcctatcatgacagctgtgttctgagaaggagcattctacgaggcccaggtgaaaagtacaagtcttcttatgatctagccttggaagtttcagaatttctgctgtttttttattggtcaagcaagtcactaaggctcttcccagatacgagaggcagggaattaactttcaatggcaggagtggcctataagtttgattccaccacagtaccactatatcccactttagagatgaggagaccgatccagagggggtgggttacttggccaagatcacacagctggtagctatttggtggcagagccaagacataagctcaggcagtctggttccagagtttgtgcttgtaaccatcacaataagcagaggtgagactctggatggggacagaggggaactatgccgctccaaggttaggcctctgttctgggggaagaagctggactcttctcttgcagctctattcagcgtgggccaggggtggtgtcacggaggtgctcttctcactgggattatgaccttgaccctccagcctggacatgtctgaaactcaggcatggacaggaagagagaggcatcaggaacactggattctgctctgtgtggccactgggatggggttttctctgtacttaattttcccatctgaatggtgggagtgttcattctgatctcaggtgacctttctagaggtctggaatattatgattctttctctgggctcctgtccctctggctgtcacagcccttgactgccctaggttatgagactgggggccccttcaaggcggggcccaggtctgactcattcttgagcccccagcatcacctggatcagggtttggtgtacaattgtgggaggctgcagggaggtgtggggagaaggtccgctttagagcttggtccctctgtgctcacctcccagccccaagcccccagcaccggatcctgctggacttccttttcctggacacagagtgcacgtatgactacctgttcgtgtatgacggtgactccccgcgagggccgctgcttgccagtctaagtgggagcacccgacctccgcccatcgaagcttcctcaggcaaggttagtggggatggggccgtggcagatacaccgagggaaatggaagaagaaaggagggacagagagtcagtaagagggcatccaagagcagagcacagggacaagggaaggtggagagaggcaaaggaaggagatgaggctctgggtcccccagggtggaagggggcaggagtgggccaccctcccaggacaatccccaggccctgcccaccttacccagcacaccttgtgcccgcagatgctgctgcacctcttcagtgatgccaactacaacctgctgggctttaacgcctcattccgcttctccctgtgcccgggtggctgccagagccacgggcagtgccagccaccgggtgtgtgtgcctgcgagccgggctgggggggtcctgactgtggcctgcaggagtgctcagcctactgtggcagccacggcacctgcgcctcggtgagccggtccccagccctgtttcccctggggccctgatctgtgagcgcagcctccacgcccatctcctaggtctgaccttgctcctgcatgaaactccccccaccaccccaccctcctccgtgacacccacttccctctccttccagagcttgcccctcacctgttactccaaccccaccccaccttcacctgcagggcctcccctgctgaggatatcccactctcatctataccccactctcatctgtgaacaccaccctccttcctccagccaggcccaaatctgtcctcccatccagccactctgtgtggccttggacccctgccatgacttccagcctcgcaccactgaccttacgccgaagctgtgtacatccagctttcaatctggattgcgctttgagccctccccgccttgacctccccagatctgagctctttcagtccaggctgaatgtcaactacgctgtctgtattctcccagcctgccgtctttctgtcttttctcctttttctctgtgcatcttttcctttttctgttggtcttcttttttccgtctgtctgcttccttctgattgtttctctttgtctcttgtttctgtctgacagtttgcctttcccctcttcctgtctctctctgtctccctttctctctctctctttccttttccatcctctcccttcctgtctgtctctttctctctccctttgtgccctgtctgtctcattctgcctcttttcctctctgtgtctcctttgtctctctgtccttgtctctccctctcttatctctgcctttatgtctcctttcccgcagcccctgggaccatgccgctgtgagcctggcttcttgggacgtgcctgtgacctgcacctgtgggagaaccagggggctgggtggtggcacaacgtgagtgccagggaccctgccttctctgcccgtattggggcagctggcgccttcctgtccccaccagggctgctggcagttttcggaggtgagcagatggggcgagtatctgggatctggaggcccggcagcctatggccagggcatgagactatccacccctccacaggccaggacctcaacaatgccctgggtgacctcgtcctatacaacttctccgccaacacctgggagtcttgggacctgagtcctgccccggtatggacccctcctctgccctggaggagcctttccactcaatcagacccagccggggacccccggaatgatcccctatcacctagtgctcccacagttcctgcagcttgatataggaacctacttctccctgtttctgccttttctctccggttttcttttttcttcttcctcttcctttatctgcctttgtgcatcttatttttccatgtgtctcctgttgctcaatctgtctctgttttcgtctgtctgacttttgggcttctgtgttctctgtttctgtgtctccatctctctggatctgtttctctctgccatttgtccctttaactctgtctccttgccttttctctctcttattgtatttctctgtttctatgagtctgtctcttcttttctctctctgccggtctctgcctttctctttgtctctgtctttatctcgccttctctccatgtttctctggctctgcatctctctgtctaagcctggctctggctctcttgctgtgtctctacctctgtctcttttctcttcctcacaggctgcccgtcactcccatgtggccgtggcctgggccggctccctggtactgatgggtggtgagctggctgacggctcgctcaccaacgacgtgtgggccttcagtccactgggcaggggccactgggagctcctggcaccacctgcctccagctcctcggggcccccaggcctggcaggtcacgcggctgccctggtggatgatgtctggctatatgtgtctggaggccgcaccccgcacgacctcttctcctctggcctcttccgtttccgccttgacagcaccagcgggggctattgggagcaggtgattccggcaggcggacggccccctgctgccactggccactccatggtgttccatgccccctcccgtgccctgctggtccatggtggacaccggccctccactgcccggtaagtgacctgtcccataacccatgctccacaggccaggcccagctcaacaccataggcctttagtctttagaggtctttgcccactgtcggactcctgtggtctctcagtcactccttccttcatgtatttacttattccttcgttcactcattcattcattcacccactcacacattctctgatgttttattcaatctcttggtgaattgccttccacacactcccacccatgtatctattcaacagagccctgcttggtgtccagcccttgctagcttatgcaggtaactcagagatgactcagggtcctgcccacagggaacttctagtttggaggggacatagagtcagtcatggccagtctcatccctgggtgatcacatggctcctaagagcctggaggagggagagagacgcttcctgccctgagcccctgccctgcttctccttcggtaggttctctgtgcgagtgaactccactgagcttttccacgtggatcggcatgtgtggacgacgctgaaggggcgggatgggcttcagggcccaagggagcgagccttccacacagccagtgttctgggcaattacatggtggtctatggtgaggaggctccccaatcctgcctgcctgcctgctgagggcctgagccaaccctgagctgaggctccctgcaggggagtccccccacctcccctaggcttgccagctatgcccctttcctccattcccagggggcaatgtgcacacccattaccaggaggaaaagtgctacgaagatggcatcttcttctaccaccttggctgccatcaatgggtgtcaggagctgagcttgccccgccaggaacccctgagggtgagtggtccctgttcttccctaggggctcctgagggtcccacctctctccatagtgattctgggctcaagccacctcagtccgtaagggtgagcctgacatccaggccagttggtgccagccttaggaggcaagcctgggatggagatgggactagggcatcgtcaccatggagatgggaggcccttaccgcagtatccaatgtgggttccaatccaggttttgccagtttccagctgccccagggaaatgcctaagaggcagcaacttttccttctttttaactttcttttcttttctttttttttttttttttttgagacggagtctcgctgttgcccaggctggagtgcagtgatgtgatctcagctcactgcaggctccaccccccgggtttcacgccattctcctgcctcagcctcctgcatcgctgggactacaggcgcctgccacctcacctggctaattttttgtatttttagtagagacggggtttcaccgtgttagccagggtggtctcgatttcctgacctcatgatctgcccgcctcggcctcccaaagtgctgggattacaggcgtgagccaccatgcccggcctcttttctttttttttgagagggagtctcgctccgtcgcccgggctagagtgcagtagcgtgatctcagctcactgcgacctccacctcccgggttcaagcgattctcctgtctcagtctcctgagtagctgggattataggcatgcatctccatgcctggctaatttttttgtgtttttagtagagacagtgtttcatcatgttggccaggccagtctcaaactcctgacctcaagtgatcctcccacgtcagcctcccaaagtactgggatcacatgtgtgagccaccatgcttggcctttttaactttcaatttaggttcagtggtacaagtacaggtttattatataggtaaattgtgtgtcatggggatttggtgtactgattatttcatcacccaggtattaagcctagtacccaacaggtaggttttttttttgttttttttttggggatggagtcttactgtgttgcccaggctggaatgcagtggtgcaatcttggctcactgcaacttccacctcctgggttcaagtgatcctcccgcctcagcctcctaagtagctgggagtataggcgcatgccaccacacccggctaatctttttgtatttttagtagagacgaggttttgccatgttggcaaggctggtctggaactcctgacctcaggtgatccgcccacctcggcctcccaaagtgctgcgattacaggcgtgagccactgtgcccagccccagtaggtagttttttgatcctctccctcctccaaccctcaggtaggcccctcaagtgtctgttgttcccttctttgtgtccctgtacactcgatgttttgttcccacttgtgagaacatgcagtatttggttttctgttcctgtattagtctgctgaggataagggcctctagctccatccatgctgatgcaaagaacatgatctcattcttttttatagccacatagtattctatgatgtatacgtaccacattttctttttttttttttctttctatgtatttttttttttttttttttttttttttgagacggagtttcgctctgtcgcccaggctggagtgcagtggcgggatctcggctcactgcaacctccacctcccaggttcaagcgattctcctgcctcagcctcccgagtagatggattacaggcgcctaccaccacagccggctaatttttgtatttttagtagagacggggtttcaccatgttggctaggctggtctcaaactcctgacctcaggtgatccacctgcctcggcctcccaaattgctgggattacaggcgtgagccaatgcgcctggcctccattttctttatccagtctatcattgatgggcatttaggttgattccatgtctttgctattgtgaacagtgctgctttgaacatacacgttagaacaatttatattccttggggtatatacccgataatgggattgctgggtcaaatggtaattctgttttaagttatttgagaaatcttcaaactgctttccacaatgcctgaactaatttacattcccatctgcaacctcactcgcatgtgttattttttgactttttgataatagccattctgactggtgtgagatggtatctcattgtggttttgatttgcatttctctcatgattagtgatattgagcattttttcatatgcttattggccacgtgtatgtcttcttttgaaaaatgtctgttcatgtcctttgtctactttttaatggggttgttttttgcttgttagtttatttaagttccttataggttctggatgttagatctttgttggatgcatagtttgcaaatattttctcacattctgtacattgtttactctgttgatagtatctttagcagtaactttttcaagatcacagtagataagtgacagagccagcatggctatccccaaacaacaatctgtataaaactatcacttaaggccgggtgcagtggctcacacctgtaatcccagcactttaggacgccatggcgggcagatcatgaggtcaggggtttgagaccatcctggttaacatggtaaaaccccatctctactaaaaatacaaaaaattagctagtcatggtggcatgcgcctgtagtcccagctactcaggagactgaggcaggagaattgcttgaacctgggaggcagagcttgcagtgagctgagttcgcaccactgcactcccacctgggcaacagagtgagattccgtccccaaaaaaacaaaaacaaaaactattacttaatctctgtgcctcagtttgctcatctgtgaaatgaaaattataacacgtaatgccattggatagctgtaagagtaaattgagatgatccttcaagaatgatgcccagtgaagtgctccacacatttcctttcttttttaaaatttttattatttatttttgagacagagtcttgctctgttgcccagactgaagtgcagtggtgtgatcttggctcactccaatctctgcctccgaggttcaagcaattctcatgcttcagccttctgagtagctgggactagaagcgtgtgccaccacacccggctaatttttgtatttttagtagagatggggtttgccatgttgaccaggtgggtctcgaactcctggcctcaagtgatccatctgcctcggcctcccaaagtgctgggattacaggcgtgagccaccgtgcctggcctaatttttgtatttttttagtagagatggggtttcactgtgttgaccttgtgatctgcccgcctgggcctcccaaagtgctaggattataagcatgagccaccgtgcccggccaggcattattattattgttgttactattttgttttattttacttgagatggagtcttgctctgtcacccaggctggagtgcggtagcatagtctccactcactgcaacctccacctcccgtgttcaagctattctcctgcctcagcctcctgagtagctgggattatagatgtgcaccaccactcctggctaatttttgtatttttggtagagttgaagttttgccatgtttgccaggctggtcttgaagtcctgaccttaagtaatctgcctgcctgggcctcccaaagttctgggattacaggcatgagccaccacgcccggcctattgttactattttagaggcagagtcttgttctgttgcccaacctggagtgcagtggtgcagtcatagcccactgcagccttgacctcccgggctcaagcagtcctcccacctctgcctcccaagtggttgggaccacaggcccatgctacccttcccagctaattaaaaacagaatttttggccaggcactgtggctcattcctgtaatgccagcactttgggaggccaaggcgggaaaatcgtgaggtcaggagttcgagaccagcctggttaatatggtgaaaccctgtctctactaaaaatacaaaaattagctggcgtggtggtagatgcctgtggtcacagctactcaggaggctgaggcaggagaatcgcttgaacccaggaggcggaggttgcagtgagccaagatcgtgccactgcactccagcctgggtaacagagggatactccatctccaaaaaaaaaaaaaaaaaaaaacacacataaaaacagattttttaaaattttttgtagagatgaggcctccctatgttgcccagagtggtcttgagctcctaggctcaagtcatccttccatctcagcctcccaaatagctgtgaccataggcacacaataccacgcctggctaattaaataaaatatttttgttttttagagatagggtcttgctgtgttgtccaggctagtgttgaactcctggcctcaagcgagccttgtgagatccagcctcccaacgtgctgtgattatagacgtgaactaccacgcccagacatattgtctttcttatagcagttagggtcctgtctcagggccagaggggtcaccagggaggagatatggagaaacctttcactctcattaaatcagacactgctttgaaatcggatgaaagccacaggccctctcttcagaagatgcttatacctgcaagttgggcgtatcacttcggggacgtgtgggcttcccagagtcgcatctgttcactcctcctccctgaaaaggagagagaggagaggacaagcgtaaggaaggaaccttagcacttaagggatgggaaggaggaaaggccccagaggaaccctgtgtgaccatcaggaataaagtccaggcctggtgtctgaggccctcattctaggtctcgtctgcctatcccttggtccccttcactgggcaggagtcaggagtgtgatgtttctggaggcctcttcctgcttcgcagtttgtgattacctgggccaagtcccacacgtttacagtgcacgcaggtcagtaagagggtagggaagtcaccattcactgaccacttacctgtcagtcaggattcttggctgtaactgacagaaacccaacccagctggcttaagcaaaaaggagaatttctggctgggcacggtggctcatgcctgtaatcccagcactttgggaggccgaggcgagtggatcacgaggtcaggagatcgagactgtcctggctaacacagtaaaaccccgtttttactaaaacacaaaaaattagccgggcttggtggcgggcgcctgtagtctcagctacttgggaggctgaggcaggagaatggtgtgaacccgggagacagagcttgcagtgagctgagatcgtggcacggcactgcagcctgggtgacaaagcgagactctgtctcaaaaaaaaaaaaaaggaatttcctggctcacttgagtgaaaactgtaggggctgtcttcaggctgggctggatctaggtgctcacaaaatggcatcagccatttctcactcaatttttcagctgggttcacttcagtctcttgccttgtgtagatggtcacaggcagctcgtggattatcttctgccataaaatgcccagaaagaagggagtgtctttgccccaagaattgagaatcaggccctgtacccctccctgagccagtcactgagactgatgggcctgggctaaggcctcacttctgccagaaccagggacaactccacctaagtctcacagattgggaaagggaaaggttggttttccagaggaaaatcaggcgctatcaccagaagagaggctggtgctagacagacaaaaatgggagactgaggcagcctactgggggctcagcagattcttcagtcctcccagctccctgaggacgagatgatggttctttttatagaggaggaaaccaagactcagagaagttcagtctcctgtccagggtcacacagctagtcagtagttgatccacgatttgaacccaagtaagtggtagatgcaggatttgaacccaagtctttctgaccctaaagatcagaaagatgatttgggtaggggcgagggagctcagcttgttcagggccaggtgggctgggagagtgtccttgggcaggtgaggttgaagcagccaccggaatagaaggctgggctgtggcccaggagaatcaggagccatggaggtggtggaggggctgggggtctaataatgtcattggggtctctattcccctaggccgagcagcgcctcccagtggtcggtactcacatgtagctgcggtgcttggtggcagcgtcctgttggtggctggggggtacagcggccggccccgtggggacttgatggcgtacaaggtgcccccctttgtgttccaggcacctgcccctgacgtgagcactggggtgacagggaaagggtggctggggggaggaggtagcagggtttccacaggtgaggggaaaggcaggaggggatccctgggagaaggagtggggatccctaggaccatgagagaagggaaggaggtccctggggcagaggaaagaggagctagaggtccctgggcctgggggaggaatggatgggcatgctgagcactcagggtcctctgggatagctaaagcaagcggggacttgggaggccggcccaggtctgagaggcctcctcctccgtccccttgcctccccctctgtccccttgcctccctgcagtaccacttggactactgctccatgtacacagaccacagcgtctgctcccgggacccggaatgcagttggtgccaaggagcctgccaagctgcaccccctcctgggacccccttgggggctgtgagtgacagccctagaccctctgttccctagcatagagacctgccctcagtgtctccctctgcctaaccagatggacaagaactttccctcaactgggagacttgttttcatgccggagatcctccttcctgattcctgactgcggagccctgaacctttgcctatcccacccagcccgacccttttgagcccgtgaccccatccccgcatcccccgtcctctggatctcccacattccaagtcaactccccgttcttcagttttttcgccctttccatcgcaggaccctgtatccacagcccttccttcccagatctcttgagctccagttgacagtgagccctttcccctctcctcctcgcagtgtccagccgccagctgcctgggcctgggccgcctcctgggtgactgccaggcctgcctggccttcagcagccccacagcccctccacggggacctggcaccctgggctggtgcgtgcacaatgagagctgcctccctaggcctggtgagtgtccgcagcagtgggccggcaggagggggccagagcactccacactgacccaccggcccccaccccctgtcttctcagagcaggcccgctgccgaggggagcagatctcaggcactgtgggctggtgggggcctgcgcctgtcttcgtcacgtccctggaggcctgcgtcacccagagcttcctgcctggcctgcacttgctcacctttcagcagccgcccaatacctcccagcctgacaaggtgggtaggaggcgtggccctgggtggggtgttgatgatcctgatcctagggtttgttttttctcaaatgcatctttatcactcttatgtttactccaaaactctttacattcaagggtcttattttccttatggactttattttttattttttttgagagggagtcttgctctgtcacccaggctgaagtgcagtggcgcagtctcagctcactgcaacctctgcctcctgggttcaagtgattctcctgcctcagcctcctgagtagccgagattacagatgcccgccactgcgcccagctaatttttgtattttagtagaagacgaagtttcaccatgttggtcaggctggtcttgagctcttgactttaaatgatccgcctgccttggcctcccaaaactctgggattacaggcatgagccgctgtgcctggcctccttatagattttaaaaagaatttttacattgtggtaaaatacacataaaatttttcatcagtgacatttagcacatttacaatattgtgcaatcatcaccactatcttgttacagaacattttcatcaccccagaggacaaccctggactcactaagtagtcactctctattccactcttccccccggtccctggcagctactaatctgttttccatctctggatttgccagttctggacatttcatgtacatggaggcctgtactatgtggccttttgtgtctggcttctttcactcagcgtaatgttttcaaggctcattcattttataacttcatttggaaaggaactctattcctttttatggttgagtaatattccattgtatagatggaccacattttgtttatccattcatcagctgatggacgtttgggctgtttccatcttttgactattgtgaataatgctggtatgagcacttgtgtacacgtttttgtttgaacatctgttttcaattcttgtggctgtatacctaggagcagaattgctgggttatatgttaattccatattcatcttattgaggaatgtccaaactgttttccacagtacctctttattgattttttgttgttgttgttgagacagagtctctctctctgtcgcccaggctggagtgcagtggcacgatcttggctcactgcaacctgcagctcccgggttcaagtgattctcctgcctcagcctgctgagtagctggaactacaggcacttgccaccacactcggctaattttttgtatttttagtagagatggggtttcactgtgttagccagcatggtctcgatctcctgacctcatgatctgcctgcctcagcctcccaaagtgctgggattacaggcatgagccaccatgcccggcctctttattgattttaaaaatagctcatatattcacatggttcaaaaatcacagtgacatcaaaagtcattggggctgggcacggtggctcacgcctgtaattccggccgaggtgggcggatctcttgaggtcaggagtttgagaccagcctggccaacatggtgaaaccctgtctctactaaaactacaaaaattagccgggcgtgatgtcgggtgcctgtaatcccagcactttgggaggctaaggtgggaggatcacttgaggtcaggagtttgagatcagcctggccaacattacgaaatcccatctctactaaaaatacaaaaattagctgctcatggtgatgcgtgcctgtagtcccagctacctgggaggctgagggaggagtatctcttgagcctgggaggcagaggttacagtgacccaagatcacgccactgcattgcagcctgggcaacagagtgagactccattttaattaaaaataaataaataaataaaaggctgggcacggtggctcacgccggtaatcccagcactttgtgaggccaaggcaggcggattacaaggtcaggagagcgagaccgtcctggctaacacagtgaagccctgtctctaataaaaatacaaaaaaattagctgggtgtggtggtgagcacctgtagtcccagctactcaggagtctgaagcaggagaatggcgtgaacccgagaggtggagcttgcagtcagctgagatcatgtcactgcactccagcctgggtgacagagagagactctgtctcaaaaaaaaaaaaaaaaaaaaagaaaaagaaaaagaaaaaaaagtcactaaatggacagtctctctcatttaccccactccctaccccttaagtggtccaaaattatctagctccagcatggctgcaacttaaggccaccatacctccctggaagatccatttgggtttctttgatcttattccagaatttacctattcagatgcaagtaagcatgacatcatatcatttttctttctcactaaactaatatactatgaacattatacgactgcttcctttttttcttcctggcaagcttcccataacagaacttaagaaacactctcattctttttttttttttttttttgagatggagtctctctctatcgcccaggctggagtgcagtggcaagcgatttcagctcactgcaaccctgcctcccgggcttaagtgatcttcccaccttagcctcccaagtagctgggattacaaacatgcaccaccatgcctggctgttttttgtattttttttgtttgttttgagacggagttttgctcttgttgcacaggctggagtgcaatggcgcaatctcggctcagtgcaacctctgcctcccgggtttgaacgattctcctgcctcaggctcccaagtagctgggattacaagtgcacgctaccactcccggctaattttttgtatttagtagagatggggtttcaccatgttggtcaggctggtcttgaactcctgacctcaagtgatctgcccacctcggcctcccaaagtgcccgccgtgcccagccttcattcttctttttttttttaagttgtataatattccatttacatttgtagtttatttaaatagcctcccactggtgaacacttggactgttccactcttctgctattacaaaatcacacaccaggaaaataaatcttgcactttgtctgccactttgaatattagatctgggctttgaagtgcttagctggaaaggtgaggagttggataagaagacactgaagtgtccagtcctggagttttaatgtgagatggaaatggctagaggccaggggtaaaggtgggctctgggaccctgtcgtctattgtctgaatttaggtcttgcctcttttcccagagtgacctttgacaagccacctaacccctgtccctctgcctcagtctctcatttggtaaaatggggaagaaggttgggttgaccagtcttttctggctctgatgtggcctgtgagtccagaaagggactcacacatacacccatccctggtggcacaggtctcaattgtccgcagcacgaccatcaccctaacacccagcgcagagacagatgtgtccctggtctaccgtggcttcatctacccaatgctgcctggagggccaggtggaccaggggctgaggacgtggccgtgtggacgcgggcccagcgcctacacgtcctggcccggatggcccgtggccctgacacggagaacatggtgaggccgcctgggacattcagggggttgtttatggtaaatagggagttaggggtgtggtatagagcatctgtggtgatttgaaggttctggggaagggctggggagaaattagaggcaggagatggattttttgtgtgtgtgtaagacagagtctcactctgttgtccaggctggagtgcagtggcgcgatctcggctcactgctaccttcacctcccaggttcaagcaattcttctgcctcagcctcccacgtagctgggattacagatgtgcatcagcactcctggctaatttttttgcattttaagtaaagatgggttttcaccatgttggccaggctggtttggaactcctgacctcagatgatccgccaccttggcctcccaaagtgctgggattacaggcgtaagccactgcgcctggctgggaatggatctttcgtagaggagggagggtgctgaggttttcaattgtgagcagaatttgagggaaactttgaagcaggtgaggaaggtctgagtcagacttgaaaggcccctgaaggctgggcatggaggtgtacacctgtaatcccagccctttgggaggtaggggcaggtggattgcctgaacccagaagtttgggactagcctgggaaacatggcgagacatcatctctccaaaaaatacaaaaattagctggccatggtagcatgcacctgtagtcccagctatttgggaggctgaggtgggaggatcacttgaacctgggaagttgaggctgcagtgagccatgatcgcatcactgcacttcagcctgagtgatggaatgagaccctgtctcaagaaaaaaaaaaaaaaaaaagcccctgaggaggagggtccctgggggtctcacctctgaggttctcaggatctaaggagctctgaggccctcttcttaggagggggtggggtacagggtgggtttggaggtatcaggggtctgaggaaggaatgggaagggttctgaggcccctgcctatcactcacacctaccccaggaggaggtggggcgctgggtggctcatcaggagaaggagacgcggcggctgcagcgccctgggtctgctcgcctcttccctctgcctgggcgggaccacaagtatgcagtagagatccagggccagctcaatggctcggcaggccctgggcacagcgagctaactctgctgtgggatcggactggtgtgccaggaggcagcgtgagtacccaggacctacctccaaccctagccgcaggccccagcctcagatcacctgggctttctgaaccccaggccacaaactctgaaatccctagattctggcctcggactccttaactcttggcctctgaactctggacctcctcttgaaccctgtggcccctgacctctgcctatagaccctaacctgatcccatattttgacccccatcttctgactcctcacccttgaccctgctgaccctgacctctgccctccatactttgacctataataatctccagattcctccagaccttggacctctttactgatttcctaaatcctgacttcctatgtgcctgagttctcaacctgggctccaaacccttactttcagttagcgccagactctgacccctgccccagaccttgactgctgccttcctgtgaccccttccccaggagatctccttcttcttcctggagccctaccgctcgtcgtcctgcacctcctattcttcctgcctgggctgcttggcagaccagggctgtggctggtgcctgaccagtgccacctgccacctgcgccagggcggagcccattgcggggatgacggggctggtgggtccctgctggtgctggtgcctaccctctgcccactctgcgaggagcatcgggactgccacgcctgcacccaggtgcctgtggggccaccaggggaggtcacaaggtggagggagccacagcaggcaatgggcagtcaagggaacccctggtggggggtgtgggggaaacagcaagggcttttggccttgatctgcagagcctggtggggagggtgagatggagctgtagagagaggcacctggggagtcaggactctccctgttgtaggggccagagaatgcaactccatccttttccactagcggggagtttctcagcataggcactggagcccaggagtaggccttcaggcctgccacctccaagtgatgtcaggcagccctcgacaccctgcttcctcttgttccctgggagggtttgtttccttgtgagtggcaagggagccgttaagggtccaggctctaagtccctgctctgtctcaaacagagtgaggcttcctatttctctccccccaccccaccaccatccaggagctcaacagaagtcccagaattgcacttctgtggctctggttgggccttgtacaggctcctgggccaatgactggagttgtggggagggaatgtggccccttgcccacctctggatcctgaggattgaataagccccacccggaccacacagaaggggtgctattgcctaaaggagacagtgggtgctgggcgggccgacccatgggtgtctgtggtcgaagggaggggtccagagacgcaggcagctggggagggagatggccttacagggacagtctgcagggtggggcagggggtgggatgggcactgggagtccaaaggaaagggctgagtggggttctgactcctctgcccaactgacccccaggaccccttctgtgagtggcatcagagcaccagccgcaaaggggacgcggcatgcagccggcggggccggggtcggggtgccctgaagagtccagaggagtgtcccccgctctgcagccagtgagtcaggctgggtgcagggagtgggtgggtggatgtgcctggggatgtgtgctggctgtggagtgacctggccccctgctccccaccccaggcgactgacctgtgaggactgcctggccaactctagccagtgcgcctggtgccagtccacccacacctgcttcctgtttgctgcctacttggcccggtacccacacgggggctgtcgaggctgggacgacaggtatggtccctggggcagggctaacagaggaagattccccaccggcaaggggctggggctctgacccccacccctgccatcctgcagtgtacactcggagccacggtgccggagctgcgatggcttcctgacctgccatgagtgtctgcagagccacgagtgtggctggtgtggcaatgaggacaaccccacactgggacggtgagcccgggcaggtgggtgggcagggtgcccggctgtgtccttcctccatgaccggtcattctaatggcctctttgcttctctgccctcttgcccatcccatggccaccttcccttttccgtactgtttttctgttgtttattttaccctcccgctcttttttctccatttttcctccttttccggctctctgcgattcgttttctttctccttgtctgtttctgtctctccgctctccctttcactgcatctctgtctatgtctctcttctgtcttccaaaattgtttttgtctgcgacttctcctggtttctctgtctctctttccaaatttgtatttgcatccctctccttccaattggcctcctctctccctgtcattgtttctatgtatggctcctgtttctatgttgtcccccgcttcttcactctcccaccctgcaggtgcctacagggggacttctcagggcccctcggtgggggtaactgctccctgtgggtgggggagggcctggggcttcccgtggccctccctgcccgctgggcatacgcccgctgtcctgacgtggatgagtgtcgcctgggcctggcccggtgccacccgcgggcgacctgcctgaacacgcccctcagctacgagtgtcactgccagcggggctaccagggtgatggcatctcacactgcaaccgcacgtgagtgaggcgggggttgctatggagatgttgccccaggctggggcacatggaggtggagggaggaagccatcatggcgctgggtcccctcctgtggaaccagcatccccagttagccaggggtttttaccttgcacactaggtccttattagagtgacagggtccccagtgtaaccctggttaccatggaaatggggcacccataggctgtgggccatagtcttcagcgttgccatggaggcggaggaggacctagttgaaagaggttttcacagtggtgctatgtggttgctatagagacaggcttggtgatgcatggagttaccttggagacagggtcacccacatagcccaaaaccatggaaacagccagtggctttgatggtgtcatggtgggtggagatgatggggtgctttaggggctctgggcctgcctggcgctttccccacccccaacacggcccctcaggtgcttggaggactgtggccatggtgtgtgcagtggccccccggactttacctgcgtgtgtgacctaggctggacatcagacctgccccctcccacacccgccccgggtccgccagccccccgctgctcccgggactgtggctgcagcttccacagccactgccgcaagcggggccctggcttctgcgacgagtgccagggtaagcagcccttgtcctgggcccagcctggacccagggagcctcctcccttcttggggctccagtttgctcttcttggagggggcctcagtgtcctctcatgcagctctaggtcccctgccccattcctgttcctgactcaaacaggtttcagtgccacccgtcactctggttgggcttcagttccccctcttgggacttgctgtttcccctgatctgggccttggtttctcacctttgaagcggctgggtggggtcagggtttagctgagccagtaggcctgggcctgtttccacccttgacttgactctgtcccacctgctggggcctccacagactggacatggggggagcactgcgaacgatgccggcccggcagcttcggcaacgccacaggctctaggggctgccggccctgccagtgcaacgggcacggggacccacgccgtggccactgcgacaacctcagtgggctctgcttctgccaggaccacaccgagggtgcccactgccagctctgctccccaggctattatggggatccccggtgagccaacgggccagccagggctgggtagggtgtgcttggggacacagtggggagggtcaggactggtctgacactggctcttctccatctccccagggccggtggttcctgctttcgggagtgtgggggtcgcgccctcctcaccaacgtgtcctcagtggcactgggctcacgccgggtcggggggctgctgcctccaggtggcggggctgcaagagccgggcctggcctgtcctactgtgtgtgggttgtctcggccactgaggagctacagccctgtgctcccgggaccctctgtcccccactcaccctcaccttctcccccgacagcagcaccccctgcacggtgagcactgaggaaacgagggttcaggcgcatgagccagaaccgtgtcccctgacccagcctgcatcctcagaccctgaccctagtattgctgtttttttttttttgtttttttaatccttcaaaacccaaactcctcctcagatccccagcactttgttcctaggcccacagacagacccccccatttcccagatagcttcctatttcctcagctcccatctccaattctccagattctcaatctccccattcctagagcaggaatggtaaattgttacaccttgtacaccaactctgattgattggtactgactgccaggagctgcatgttgagaaaggggctcaatgcaagagtgcctgatagatgagccgtgtctactttggacacaggaaggggagtggtggccttatgccatagtttgacagtctcccctggatgttcaaacagcccatttcccagtctcagattgccctcccctcttgaacccctcctcctcccagaccccaggtgtcgttctcatcctcattgtctcctaatcctcgattctgcacccctctagctgagctacgtcctggcgtttgatggattcccacgcttcctggacactggtgttgtccagtcggaccgcagcctcatagctgccttctgcggccagcgacgggacaggcccctcactgttcaggccctgtctggtacgggggctaggggaagtgggacctcttagtcctgggctatgtatcccttgcccctgaactcaccacctgaagtgggctcaggacccagctctgccgctgcttatggggtgatgtagtccctcaccatctctggacctcagtgtccttagttgagaggaaaataggattgcgccggctgagctacgtctgcagagagaagggctgaatgagacatgtctctggggcatatagaatgtggttggtgtgaggatcccacaccactcactctttccagctaggcaggagtgtagtagcgcaatctcagctcactgcaacttctgcctcctgggctccagcgattctcctgcctcagcctcccgagtagctgggattacaggcgcatgccaccatgcctggctaatttttgtatttttagtagagacagggtttcaccatgttggccagtctggtcttgaactcctgacctcaagtgattcgcccaccttggcctcccaaaatgctgggattacagacataagctgctgcgcccggcatatatatatatataactttattgaggcatattttatatatactaacatatcaagtaattcctgtcacacctacccccaaatcagtatcttttctaaagagatccagtctcatgtaagggcagtaggagttgtggaaggtttggagcttgctgattacagggcccaattcacgttttgaggatcgctgggccaccatgagtggggagtgtaggcagccaggatgaccagtaggggatgggtgccggtgtccaggtgggacaggacttgggcttggatagcagctcaggaggtagctagcagtcggtgagagatttaggcttgaagatcaatcttgatgggttggctgagggagggggtgcagaatggttcatcctggcgatgattatgaataatatggtgccttccttccctgcccagtcacactgggttttcttagcatctgggggtggaaggggccaggaacgtgactttgctaccagcctctggcctctctcttcacagggctgctcgtgctgcactgggaggccaatggctcctcatcctggggcttcaatgcttcggtgggctctgcccgctgtgggtcagggggccccgggagctgtcccgtcccccaggaatgcgtgccccaggacggtgctgcaggtgcggggctctgccgatgtcctcagggctgggctggcccacactgccgcatggctctgtgtcctgagaactgcaatgcccacactggggcaggaacttgtaaccaggtacaggtgggagagggcaagtctggtgggacagggctggtgatcagggctcccctgagtcccttgtcatcccccagagcctgggtgtgtgcatctgtgccgagggcttcgggggccccgactgcgccaccaagctggatggcgggcagctggtctgggagaccctcatggacagccgcctctcagccgtgagttgtgggtacccgctgtctagggatggttgctcccaggtcgttctcccacctccattcctgggaccacccctacacccaggcctggcactttgtcctgaccctagcctgatccccaatgtccgcacccacccctaggacactgccagccgcttcctgcaccgcctgggccacaccatggtggatggacccgatgccaccttgtggatgtttgggggcctgggcctgccccaggggctgctgggaaacctgtacaggtgaggactgccctgggcaggtgggattcgcaaataagagaaggtcacctcgggatgctaagagtcacctcagaggagtgcagaaaagcctctaaggtaaaggacagcccaaaggatgctgggacacttgtcacaggaagctcacccggggacacttggggaccagggtacttatttgggtggtgctactccagggaatggcaagaggactgtcataggaaggtcaccccaggggatgcggggacatctgtcaggcagggtcaccttgaaggatgctgggatgactgtaatgaggctgcttttttgcaccctggccccaggtactcagtgagtgagcggcggtggacacagatgctggcgggagccgaggacgggggcccaggcccatcgccccgctccttccatgcagccgcatatgtgcccgctggccgtggtgccatgtatctgctggggggacttaccgctggaggcgtcacccgtgatttctgggtcctcaacctcaccaccctgcaatggcggcaggagaaggtgagcatctctccccagcccactccccagccctcacactgggccctgacagagacagctgtggtagctcctgccagctccatccccagaggaaacagaagccccaaacttgaatttcctcggccatcctgggtcacactgttgtcctgagccagtcctgggctgggacacagcttcactcagcagcagagagaggccaggggagcaagggcttcccaaagccacaccaggcttgagcaggtggaaatgccaaggggcccactgtgcctctgccaggacccaggctggtccgactggccctgggggggtcattccctccttagtacttcagggaggactgtggggggctgaggctcgcttctacccacaaggtgacccctgacctctagccccatcggtgaccttgcccctccatccctcaggccccccagaccgtggagctgccagccgttgctggtcacacccttactgcccgccgaggcctgtctctgctcctggtgggcggttactccccggaaaatggcttcaaccagcagctgctggagtaccagctggcaaccggcacctgggtgtcaggagcccagagtgggacaccccccacaggtggggctggggaccgggaggggacagcccccgtggacctcccgggcatctgggcttcctgtgggctctccatccactgctgtgctctgtggccacctgtctccctctctttcccatccccatgcagattctcagggcaccctcttgaatgttcagattttctgactgtccttcccagactccacaactaactgcccactcccggccacatgtggccaccgtcccctgcccccagggtctgagctccctgcttctcaagggttcttcctcgatcacacctcctttctttgatcactgtcccctagacattctggacgccctgtctccctcccgagagcctggcagaacttactgccagttgaggactcccttctctttcccagagtctctaatgattgtccatttgaacccaactgagagggacgggtggagaggggctcccaggcctccagtctcagggccggggaagggagtggtcaccgaacaggggaccgggaggtcggcggggtcagtgctgttgtcagcccctcccccagcctgtcaccctgcccctcaccaggtctctatggtcactctgctgtctaccacgaggccaccgactccctctacgtgtttggggggttccgattccatgtggagctggcggccccatcccccgagctctactccctgcactgtcctgaccgcacctggagtctgctggccccttctcagggggcaaaggtcaggaaaagaggctcagacccaaggatgtatggggcaggagggaggggtcctctttcccagtgccccagggactggctccatcccagattcctgcttcccctcctttctatgttccctaactaagcgacacccccacatctcccccgcttccatccctgatttggaggagagaacccgaggccaggaggtcagaggcatgagttctgcccagctctcccctgagtcttggtgcggccctggcaggccccttccccgtcctgggtttttccactcgtataaaccaggactgaggctccccgctctttctgccttcaaggccaaggagaatgtgtgtgggagggcagggagccctgtctgcactggttagagaggctggtggtttcagtccacacgtttccaagcccgtcttggaggcagggggctagaagcaagagactcgaggagcctcaaccccaggacgcccccactgtcactagcgagatcgtatgaggaatgtgcgtggctcatctcggggtctgggccaagttcctggggagcagcctgggtcatgggggttccgggaagtcaggaagaagatggctctgtgggctgctcttgctggtacaggaggtttcctggaggaaatctcacctcacctgaaggaggtgagatttgaagagggttaggattgggtgggctggtagggggggataggtagggaagtacaggggtggctggagggctaagagggagcagaggacagctctgacaggctgtcctgtccccccaccccccgtctccccaacagccccgcccccggcttttccacgcctcagccctgttaggggacaccatggtggttcttggggggcgctcggaccctgacgagttcagcagcgacgttctgctctaccaggtcaactgcaatgcctggcttctgcccgacctcacccgtaagtccccattgtggctcccaggaggctgagggacatccaggaggagccccatccccatcctgggactcccactccttaggagtcactgggcccctgcagacccactggcagagctcccgctcttctggattatctgaacaccaggacatgccctccttccttttttttttcttagagaagtttattttttactctgtaaaagtaacaatgttcactatatataatttgtaaaataggaaagaaaaaaaaacacccataatccctctctctagagacaaccactattagacatgggggtgtttcctaccagtctttgctgttcataggtagaagcatgcctgtcacttgcctttttatttcaatgttgtgagtgactgttgtgagtgtgtttctgggactgtctccttttctttttgcttctctctctgaccctttgtctctttttctatttttattagcaacagggtctcactgtgttgcctaggctggagtgcagtgatgctatcttggctcactgtagcctctgcctccaaggctcaagcaagcaatcctccctcctcagcctcccaagaagctgggactacaggcatgccaccacgcctggataattttttttttttttttttttttgtagagacagggttttgctatgttgcccacgctggtcttgaactcctgggcccaagcagtccacctgcctcagcctcccaaagtgctgggatttaattccctttttctcttaatctgtcttttcagattcagtagacagagactacttcatgtctgtgtctctcagttattttttgaggatttaaaaaaattgaggtgaaagtcacataacataaaattaaccatcttaaaaatacattggctgcagcctgggtgacagagcaagactctttctcaaaaaaaaaaaaaaaaagcattggcatttagtgccttcagagagttgtccagccgccacatctatctggttcgaaaacatttgtctctcttcttatttccctctttgtgttcctttgttgtctgcttgtgtctctctccctctctttttttttgcttgctgtctatcctcatgtgtttcctctctgcttctgctgtttttttttttttttttggagacatggtcttgttctgttgcccaggctggagtgcagtggtgcaatctcagctcactgcaacctcaacctcctgggctcaagtgatcctcctaatttagcttcccaagtagctggggccacaggtgcgcaccaccatgcccagctaattttttattgtttgtagagacggggtctttctacgttgcccaggctggtcttaaactcctgggctcaagcagtcttcctgcctcagcctcccaaagtgttgggatcacaggtgtgagccaccgcccttggccttgtttctgctgtcctttgaccctgtgtttctcctctttccctgcatccttctctgactggcatcatggtgtgggtctcttcctggagtctcctgctctctatctgtctgaatacaccatctttcctcaggctcggcctctgtggggcccccaatggaggagtctgtggcccatgctgtggcagcagtcgggagccgcctgtatatctctgggggtttcgggggagtggccctgggccgcctgctggcactgaccctgccccctgacccctgccgcctgctgtcctcacctgaagcttgtaaccagtctggggcctgcacctggtgccatggggcctgcttgtccggggatcaggcccacaggtaaccatggcgaccatgacaggcagtggggagtggagccctctaatgggggtcctgtgctaggccacaccaggatggaggcctcaggagtataccgtctggttcaggaaaggggtgaatcaccgcaggcagggtggccgggggagctctgagtggggatccctgcctgggactggggtctcatgcaagaatgcttgctggaggagctgggtctgaactgggccttaaaagaacggtagagttgagaccatcagtgattcagaagtgaggctgagaccggaagctggagggggtcagctcagaaagggcttcccatgcctggcagaggcactggctctgtccagctccacagatccttcagctgcggttccaggaatgcagacatcctggacactgaaagtgttttcttaggcttagcacagactcacttcgctgcccagtcaccctcactgatatgaggctattagttggccttatttgcccgaagggtgtgttgtcagttactacaggaatgttaatggtttgatttcggagtgctccttaccccagaccccactggaggtattgtgtaacagtgggtacacccactgcttttctaaaatccagaacagtctgaaacgtgtgtacctcttgggatttggggtaagggattgtggaccccccctgtgcaggacagggagccatggaaggcctgagcaggacagggcagggacgggcctgggcagtgagatccctggcgctgttgtgaggggtagagtgacgagagcctgcaggtggggaccaggttgggcaaggggctgcaggggtggggaggaggggacggtcagggagaaatccaggaggcagaaggcttcggtggctgcatgggcaggaggacctggggtgtggtccagcgtctccagcctgggtgacaggtggatgtgggaccatctattaccaaatggtggtggggacagccaggctcaggaggcctgtgctatgtccagcttgggatgcagggttgggggcctgcaggacagtgtctgggaggcagaaggagggggtctggatgggtgtgagtgagccaggcctcatgtcctttaggctgggctgcgggggctccccctgctccccaatgcctcgctccccggaggaatgtcgacgtctccggacctgcagtgagtgcctggcccgccatcctcggaccctgcaacctggagatggagaggtgagtggtggggaaggcagggatgagaagcagcaggtgtagggcagggaggtcctggtctccactctggtcagctgtcccacccaccccagggtctcaggaaccaccgagttctcagctggctcaggaggggtgctgagggtcccatctagcctgtcttccctcaccaggcgtccaccccccgctgtaagtggtgtaccaactgccccgaaggtgcttgcattggacgcaatgggtcctgcacctctgagaatgactgtcggatcaaccagcgagaggtcttctgggcagggaactgctccgaggctgcgtgcggggctgctgactgcgagcagtgcacgcgggagggcaagtgcatgtggacgcggcagttcaagaggacaggtgagcagtgggcctagttcctgagaggggagtcttggggcctggactcctgggtctgagggaggaggggctgggggcctggtctcctgggtctgagggaggaggggctgggggcctggactcctgggtctgagggagaaggggctgggcccctgatctcctgggtctgagggaggagggactggggcctggactcctgggtctgagggaggagaggctggggcctggactcctgggtctgagggaggaggggctgggggcctggactcctgggtctgagggaggaggggctgggcacctgatctcttgggtctgagggaggaggggctggggctggattcctgggttaagggaggaggggctgggcctgagctcctgggtctgagggaggaggggctgggcttgcgatctcctgggtctgaggttctaatccccgtgccccacccccaggggagacccgccgcatcctctccgtgcagcccacctatgactggacgtgcttcagccactctctgctgaatgtgtcccccatgccggtggaatcatcacccccactgccctgccccaccccttgtcacctcctacccaactgtacctcctgcctggactctaagggagcagatgggggctggcagcactgtgtttggagcagcagcctgcagcaggtactgcacctggccaggaccgtgccaggcaagggcccgggcaggtctccctcctctctgcgctggcagggacctttcttccaccatctcctccaccctcctccttccatctccctggctctagctgcagtcgtgcttccttctcgtgccaccatctctttcctccctcgttgcctcatgagggtccctgttgtgtcctccagccatgcttctgtgtgtgccactttcccaacccctggcctctgcctctccaactcttgtccatggtatcatggtctcctcatcctttccatgactttaaaaaaattttaatttaattttttgtttttaattttgtcgatataattcataggttcacatccacgactcttaatgcttcttccttcaacctcccaaaccttttctgcttccctcctctctctctttctctctctacttatggaacttttggttataagaaacagacactccctcgagctggttttgttataaggaagtgtgggtatttgatggactctgagagcaggaagtgtttctgctctgttgctctcaggccacatgacccgtaatctcagctgttctccacacttctccattgtcgggtttctgtcggtctgatagtcaacacacatggcctcagattgcagccttgactcccagtctagatgccttctaattccagagaccacgttcatctctgtgtttgtcggttagctcacattctcgaggagaaactctgacttagtgcacgagctacatgtccagccttggtgtagtgggatgtggccagggagggctaggagcacgtggttcaaacgtggcacgtcagatctaggcctcttctaggctgtggggtggagagatgattcctgaaggtgggtgtggcctaggcaggcatgtgtgtacccgtgacagtccaccccttggagtgcctggcacatgctctcttgtttccagaaactccattccaaagacgcttccacctgacatgattaaactgtcgtggtggcagacaaaggcattcgcaccccaccccactgcccccccgtgggagataagacacattcacctcccactgtcacatgtggaagcaatgtcactcagccagagcccactcctcattcatacctcgattatgcaagacccaattgaggcaaaactgctcaccatccgacaacccatgaactaagtgatcagtccagccaccacccagacactagtagacaacagtgcagggatgtgggacacttgccattttgagaggtggactaaagaaaccaacagcacttcgtggaaattcgagaccaggagggcagggtgtggaggaccaagaatcccacagaccttggcatccagtgccaggagccctgcctgggagtggtacattagctctcacccggaggtagtttgccttgcgatcaaaagctcaggctgtgaagtcagtgggatctgggtttgactccaacttggccacttcctggctgtttgactttggatgagtgacttcccctctccaagacctcagggagagtttgctaaaatgggaatcatttcactagatcctgtcccctagggaggttgtaccagttaaatgggggagaatttacttagagcatagagcaatgcctgccattcaggaagcactaaaaaatggctaatgatcatgatcattgttactgtaatgagcagtggtgagagggccaatctggctgacccaagtcctgccactgggaggattcccagtctccactgtatgggacacaccaagagggtggctgcgggagttccccatgggggctgtcaatgtggccagaagggcagaagcccctgtgattttggtctgtggtaagcagaggcctctcgtctccaagcctgggatcctaatggtagtatgggttctccccagatattattgaaatttccatcatttatctttgtgggagctccagggagcagaaggcatacccacagtcctgcgggcatgcgctgttcccccagcctctcggtgcttgccaagttctcacacgcctgaagagctggggcagctaaggagatgggggagtggccaggagggtggcaaggggaagaggtggggccagtgaattggagagcacagcctgtccccaggggccagatgagcattgttgatggtgtatgtgaatgtgagaggggacttttaccagactttctatgaaacctcctagctttaaagtgatggcttagctgggtggggtggctcaggcctgtaatcccaacacttcaagaagctgagacagattgattacttgaggccaggagttcgagacctgcctgggcaacatagcaagaccctcatctctacaaaaaaaaaaaaaaaaaaattagccaggcatagtggtgtgtgtctgtagtcccagctacttgggaggctgaggtgggaggatcacttgtgtctgggaggttgagactgcagtgagccattattacagcactgcactccagcctgggtgacagagcgagaccccgtctctaaaaaaaaaaaaaaaaaaaaaaaaaattaggccaggtgcagtggctcacacctgtaatcccagcactttgggaggctgaggtgggtggatcgtgaggtcaggagttcaagaccagcttgaccaatatggtgaaaccctgtctctactaaaaatacaaaaattaaccaggcatggtggcaggtgcctgtaatcccagctactcgggaggctgaggcaggagagtcgcttgaacctgggtggcagaggttgcagtgaactgagatcgcaccactgtactccagcctgggtgacagagtgagactccgtctaaagaaaaaaaaagaagtgttggcttagattccaccgcacaaatcaaacataataggcgtgcaggtgatacctgttatgatttggctcaagggctgcctgattctaaccatcccgcattgttctttttttctttttttgaaacagagtctcgctctgtcgcccaggctgtagtgcagtggcatgatctcggctcactgcagtctccaccttccaggttcaagtgattatcctgcttcagcctcccaagcatctgggactatagatgcacgccaccacacctggctaatttttgtatttttagtagagactgggtgtcaccatattggccaggctggtctcgaactcctgactttgtgatccacctgcctcggcctcccaaagtgctgggattacaggcatgagccaccacgcctggcccagcattgttctttttaatggctttggcctgtgagtctggggcaggcagcggagacactccttctctggtctgcctccttcctctcatcctccctccctctcttcagcgaatttatcattgagcaccttctttctgctgggtgctttgctaggcagtggggaatgtcagcagatgagctagagtcctgctctcagaacttatgttcatacaccttttccatgaactcaggaaatgcagtgtatggtgttgggcatctttgcatttggtcactagggagattacagcagaaagtgctgtccaggactgaggattcagggttctctacccctcccagattgtcccaccatctgccaacaagtgccctaaatttagatctggaagcccagcccagcagagaatttgcctctggcagttcagcaagtctcagtgatttgcaggcccctcagtgggctcagagctccagccacagcagtcagggttttctatttcaggattccatggttgctttgccttttcctaagtgctttcaggcagccggcccaaattaacctctttcctcttattcttcacttatggcccaagcaataaataaagtgccttatacactgaggtaagttcccaagagcctgaatctcattgtgcacgtttttggggtcctgacatacaaatatggcttgtgagttgctacccagcccctaaccaaggactcttcaggttctcagtgtggggtaagagaagcctttttgcctcagcagccacatttgttctttttcttgtcttttctttctttcttttttttttttttttgagacggagtctcgctctgtcatccaggctggagtgcagtggcgcgatctctgctcactgcaagctccacctcccgggttcacgccattctcctgcctcagcctcctgcgtagctgggactacaggcgcccgccaccacgcctggctaattttttctatttttagtagagacagggtttcaccatgttagccaggatggtgttggtctcctgacctcgtgatccgcccgcctcggcctcccaaagtgctgggattacatttttctaagaaactgtggtttgcaaccccactcctgatactcttttctgtctccttctgggaacattgccattgttcctttacctggaagaaacagaagtgcccttagtgaggaggggaactccctccaccaatgcagtagtacctgttggaacccaggatagaaagtacagcagggcctcacaaggaactggagacagactggaaagctgcctttctatctgtctttagggcacgtggttctcatctctgtctctttctgcagcctgctcttttcctgcctgtctgcgtcctctttatttaatcatcatttgcttatctaaacaatcccttcaacccaagtctacgcgatcttccagtttattttctttttttgagacagagtcttactctgttgtccaggctggagtgcagtggtgcagtcatgactcattgcagcctcaaactcccgggctcaaaaaatcctacctcagccccccaggtagctgggtctacagatgtgtgccaccacacacagctaattttttatattttgtagagatggtgtctcactgtgctgcccaggctggtctggaactcttgggctcaagtgatcctcccactgtagcctcccaaagtattgggattacaggtgtgagccactgcggccaggcaaccttccagtttcaagatcctccccagcctgacttcccgccttggtgtgtagttacaaacgcttgagagggaaaacatgatgaccccagctagtgtccactttgctctacctgtggccagggaggggtgagacctcaaagagggtgtggtctgggaagatacccagaatgtgtttgtttaagcttatttccccatctctctcttccctgcatccccatcccctcccccccatacagtgtctgagcccttcctacctgcccctgcgatgtatggccggaggctgtgggcggctgctccggggacctgagagctgctccctgggctgtgctcaggcaactcagtgcgccttgtgcctgcggcgcccccattgcggctggtgtgcctgggggggccaggatgggggtggccgctgcatggagggtggactcagcggcccccgtgatggtgagagggctttgggcactgggggagaggggctggcccttggttggggtctgatacagtgaacatagggatactgggccagacccagaggtggggctcagaggaggcaggagggagggcctaggcaactggggcaggtggtacagaggtccaggtaaaatgctatatccccggtgctagggctgacatgtgggcgtccgggggcctcctgggccttcctgtcctgcccccctgaggacgagtgtgcaaacgggcaccacgactgcaacgagacgcagaattgccacgaccagccccacggctatgagtgcagctgcaagaccggctataccatggacaagtgaggccgcaggcggcgctggggccaggcaggctagggtgggagagtctgtggggagcagtaatggatgaggcctagagccaagcaggacagaagaaaagaaagctcgaggcatgaaggcagtgggattgattcctgaaggtcaagagtggtgaggctgagcagggaagagtgagtttcatagggtaccccaatggccgggcacagtggctgatgcctgtaatcccagcactttgggaggccgaggcaggtggatcacttaaggccaggagttcgagaccagtccacagggagaccccatctctacaaaaaaataaaaaagaaaatagggtaccctcaaaagaggagagagggttgtgggctacacctggagggggtggtgggctagatcctgaagagaagatagcaacgggacagagcagggatgagcaaccagttgagaagagggtggggtagttggttgggtgctaggccatgaagccacgaggagggtggccacctgccctgacccccactttgcccctgcagcatgacagggctgtgccgccctgtgtgcgcccagggctgcgtgaacggctcatgtgtggagcccgaccactgccgctgccactttggctttgtgggccgcaactgctccacggaatgccgctgcaaccgccacagtgaatgcgctggtgttggggcgcgtgaccactgcttgctctgccgcaaccacaccaaggtgggccgcccggagcctcagacccccgaccctgggacccaggccctcacttgccttcatcccacgctcaggcggctcgcatctcatcctgagccctgataagccagggacagataagccagagccctgtcccagggagatgtgtggagacttgggggacgctgcctgggtttggatcccagagggtctgccctggaatagtggacggagtgggtgctgcgccaggaggacaggcacgtggaggaggatttgagataatggagggaagggcttttgaactcagcactttgggctgcaggtgtgcaagggaaggcgggggctaaatcccgctgggattgtccaaaccaggtacccgagcctctgctgccctcccgtgggctctcagaacctgcccctgtgcccccaacgccctcctacccctgatgactctccagcctctctaactaccctgtcctgggttctcagggcagccactgtgagcagtgcctcccgctgtttgtgggttcagctgtcggaggcgggacctgccggccctgccacgccttttgtcgtggaaatagccacatctgcatctccaggaaggagttacaaatgtccaagggagagccaaagaagtactcactggacccagaggaggtgaaagagaggggtcagatgcctgggtctgagggaggaggggctggggagctcctgggtctgagggaggagggggctggagacctggacccttgggttgagggaggaggggctggaggcctggattcctgggtctgagagagtagaggtgggggtcttgaactcctgggtctgagggaagaggagctggggcctggactcctggatctgagggaggagggggtgggagcctggcctcctgggtctgagggaggagtgggtaggagcctggactcctgggtctgagggaggagggggttggtccaggcctttctatgatcacactgtccttccttggccagattgaaaactgggtgacagagggtcctagtgaagacgaggccgtgtgcgtgaactgccagaataacagctatggggagaaatgcgagagctgcctgcagggctacttcctcctggacgggaagtgcaccaagtaagaggaaccgggggggggggggggggggggggggggggaggccggggatcccacccttctcactgggagtagctctggagccaggccccctctttagtcctccacccccagtcaggagaggatgacatccccagggagcgcccaggctggggtcagggtagggaaggagctggaatgtgatgccactccctacctccaaggctagtgctgaagtgcagtccacagagcggccccatcgagaacaagatggggcggctgagggcagaggccttggaacaacctcccctttccatctccttctttctgagtgttcagtgagtgctggagtctgtgcaactcgggttctaatcccaatggtaatttaactgctttgtggccttgggcaaacagcttgacctctgtgaacctcagtttcctcttctggcctgttgcacagagttgagctcacatatggggtgtccatcctggaccactgcaggccatgggggctccgtaaccctcaacttcttccccagatgccagtgtaatggccacgcggacacatgtaacgagcaggatgggacgggctgtccatgtcagaataacacagagacgggcacatgccagggcagctcccccagtgaccgtcgagactgctacaagtaccaggtgcggctgcagaagctagtggtgggccgagggccctacaccttgtggaggtcagggctgggatgaggtagccaggctcgggcaggactgacaacatggttccaaatcagtggttttgggatcaagtgcagcttgacagactgttcctgagccccattcagttacaggccctaggcagtgatgctggggaccaagatatgagcctctgggggactctcagactggtggggagacagtctccattacaggtagtcacagctaaaggtggcacatgccagaaaatctatcccatggtagctcaaccgaaaaaagaaaatgggctgggcatggttgctcatgtctgtaatcccagaactttgggaggctgaggcgggaggatcacttgagcccgggggttcaagaccagcctgggccatatagtgcaaccccatctctgaaaaaaaatttaaaaattagcctggcatggtggtgcacatctgtggtcccagctacttgggaggtggaagtgggaggattgcttgagcccaggaggtcgaggctgcaggactctgtctcaaaacaacaacaacaacaacaacaacaacaacaacaaacacacacacacacacacacacacaacagaagaaaagaaaatgtattgactcttagaactgagggtctggggtctgccttcaggactggctatatccgggtgctcacacaatgccatcagaagtctctctgcatcttgactctgctttcctctgcattggcttcattttcaggcagattcttcccagttggcagaccccctctgatgaactgaggctagcagagatctcatatcatttaatacccagattcaaattcccctcgagtgcatttccctttttcttctgcacagaggctcctggagtgcctgcactggccacctggctggctgctgtgttccagacttgcctccatgatgtcccaggctccttcctcagaggacaactcccgccacctccccgccaccttctctctccagtcccagagggaagagaaagtcccttgctctcagtcttccttacccatctacagaaacataatagctgcaaacataatagctgccaccccaaatggcaacagttttacaagccttactgacccttaacatttctatcctgggccagaatttctgcttttttattttttttttaatttttaatttaatttaattttttttggacacagagtattgctctgttgcccaggctggagtgcagtggtgggatctttgctcgaggcagcctccacctcctgggttcaagtgattatcctgcctcagcttcctgagtagctgggactacaggcgtgtgccaccatgcctggctaattttctgtattttagtagagatggggtttcaccatgttgcccaggctagtctcaaacttctgagctcaggcaatccacctgccttggccccccaaagtgctgggattacaggcgtgagccaccacacccagcccagagtttctgctttcttgataagggaaaggcctattggcttttaccagggagtctcagagattaaatcagacctcctcctctaccaggtctgttggctgcttagaagtagcagtttttcttggttcctttttttttttgagacggagtctcactctgtcgccaagctggagtgcagtggcgtgatcttggctcactgcaacctccgcctcccaggttcaagcgattctcctgcctcagccccccgagtagctgggactacaggcacgtaccaccaccccccgctaatttttgtatttttagtagagacagggtttcaccatgttggccaggatggtcttgatctcttaaccttgtgatctgcccaccttggccttccagagtgctgggatcacaggcgtgagccaccacccccggccggttcttttttttaatgtatttatttttaagacagggtctggctctttcacccaggctagagtgcagtggtgcaatctcagctcattgcaacctctgcctccctggtttccatcatcctcccacctcagcctcctgagtagctgagactacaagcatgtgctatcatacctggctaattttttttttagagatggggttttaaccatgttgcccaggctagtcttgaactcctgagctcaagcaatccactcaccttggcttctcaaagtgttgggattctaggcgtgagccaccgtgcctggttgggcttttgggtttttttttttttttttttttttttgatacagggcttactctgtcacccaggctagagtataatggcgcaatcatagttcactgcagccttgaactcctgagctcaagtgatcctcctgcctcagcctcctgagtaactgtaactataggcacacaccaccatgcctggctaattttaaaaaaattttaaagacgggggtcttactatgttgcccagactggtctcgaactcctgggctcaagcggcactcctgcctcagcctcctgaagcactgggattacaggcatgagtcactgcgtctgttttctcttggttctaatagtgattgcagtaataactagaatgccaggagcgcctgccacagagctggatgctgtgctgtgtagacagtggtgacagcatagatatgaaaggctttgcaagactgtgctggggcctcagtggggtacagacttaagaggaagacagattcagagacattaaatgtcctagctgggcacagtggctcatgccagcactttgagaggctgaggcgggcagatcacttaaggtcaggagttcgagaccagcctggccaacatggtgaaaccccttctctactaaaaatacaaaaattagttgggtgtggtggcggacacctgtaatcccaactactcgggaggctgaggcaggagaatcgcttgaacccgggaggcagaggttgcagtgagccgatatcacaccactgcactccagcctgggcaacagagcgagactctgtctcaaaaaaaaaaaaaaaaaaaaaagtctcaccccagatcaggtggtcagttaggcttggtgcctggagtgaccctggtctgatctcagaacttgagtggtttccactaagccacaggaatcatagccgttatctatccagccacacattcattcagcacacagtcattgagcacctagtatatggcaagcaccgtgcaggttgctggggacacagtagggaacaaagcaggcaaatgttctgtctttaggagtttgcattctcatggaggcatcagaaatgaacaaacaagtcagatgctcgtgtgttagacagcgaggagcgctaaggaaagttaagtaggaagcgggggctagggctgttggggagtgggaatggtagacgcaggacacagtggccagggaaggcctaggtgagaaggaggctcttgagcaaagatctgaaggaggcaagggggcttgacaagctgacaagtgacaggagaaccatgcaggcagagggtccgccagtgcaaaggccccagggtgggagggcgcctggcacagtatagaagaagcatccaggcaggcaggcgaggctggctgaccctgcgccgagtgccatgcacatgatctcagtggtcctgtgagcgagccgtggttactccctgtgtgcagagctcatgggttaagtctgtgtgctcaggctcagtgaggttaagtcactagtccaaggccacacagctaacaaggaggtagagccagaatgcagccgcgttcttcactgctgtgcctcagagtgccagaggcctcagtatcagggtgctcaggtcactagggtggcaccaggggcagcagtgctggagtgccaggtcctggcaaggtctacactgtggcagagaaggtccggggggtcacagggaagtgactggggcagtgggggtgaggcccagggcaatggctacttagcagtgggtatagagtattcgtcactgctgcttgggggacaggctggcaccgcactcagccctgatggtcaccgcctctaaccctgcccgcagtgcgccaagtgccgggaatcatttcacgggagtccgctgggcggccagcagtgctaccgcctcatctcggtggagcaggagtgctgcctggaccccacgtcccagaccaactgcttccatgagcccaaacgccgggcgctaggccccggccgcactgtcctctttggcgtgcagcccaaattcaccaacgtggacatccgcctgacgctggacgtgaccttcggggccgtggacctctatgtctccacctcctatgacaccttcgtggtccgtgtggcccctgacactggcgtccatactgtacacatccagccacccccagccccaccacctccaccaccccctgcagatggtgggccccggggggctggggatccaggaggagcaggggccagcagtgggccgggcgccccagcagagccacgggtacgggaggtatggccgcggggcctgattacctacgtgacggtgacggagccgtcggcagtgctggtggtccgcggcgtgcgggaccggctggtcatcacctacccacacgagcaccatgccctcaagtcgagccgcttctacctgctgctgctgggcgtgggagacccaagtgggcccggcgccaacggctcagccgactcgcagggcctgctcttcttccggcaggaccaggcccacattgacctgtttgtcttcttctccgtcttcttctcctgcttcttcctcttcctctcactctgtgtgctcctctggaaggccaagcaggctctggaccagcggcaggagcagcgccggcacttgcaggagatgaccaagatggccagccgccccttcgccaaggtcaccgtctgcttcccacctgaccctactgccccggcctccgcctggaagccggctgggctcccacctcccgccttccgccgctctgagcccttcctggcacccctgctgctgacaggggccggtgggccctggggacccatgggagggggctgctgcccaccagccatccccgccaccactgctgggctgcgagctgggcccatcactctcgagcccacagaagatggcatggctggcgtggccacactgctgctccagctgcctggcgggccccatgcacccaacggcgcctgcctggggtcagccctcgtcacactgcggcacaggctgcacgagtactgtgggggtggtgggggtgctgggggcagtgggcatgggactggtgcgggccggaagggactgttgagccaggacaacctcaccagcatgtccctctgacatgcccagggttctcatccacagcagctgggtcacctgatagggccgccctggacttggggtccctccacctgggggcccctggacactgtctacttggagaccactggcccccttcccccagggttgcccagatggggcctcctttgttctgcattcagcagctatttatcgagtacctactctgtcaggcactgtcataggcgtggggcaaagcaggaaccaagagacgaggttccctgatctcatgggacttaggttctggtgaagggagacaatcagtgcacatgcacacaccccacacgcatacacacatgaacacatgcacatgtgcacacacaagtaagatggcttcagagagggagaagcactgtgaggcctccagaggatgtggcagtgagggacgatggggtgaagtcagctgggcattcaaagaagctagactgagaacgcctgagaagaaccagctacgggaagagctttgggaagcaaaggcagaggccctggggtgggagcaggcttgttttattggaaggaccagaaaactggtaagtgtgacccagatcaagtgtgaggagatgaggctggggatagtcaggggctggatcacccagggccttgtgggccccacatagggttttgggttttattctcagggcaatgggaagctgttggatggtttgatgaaggggagtgacaggatccgatgtacctatttaagaatttaagagggtcgggtgcggtggctcatgcctataatcctagcactttgagaggccaaggtgggctgatcacaaggtcaagagttcgtgaccagcctggccaatatggtgaaaccccatgtctactaaaaatacaaaaattagctgggcatggtggcacacacttgtagtccgagctactcgggaggctgaggcagaagaatcgcttgaacccaggaggcggaggttgcagtgagctcagattgcgtcactgcactccaacctgggtgacagagcgagactccacctcaaaaaaaaaaaaaaaatttaagaggtcactcagttgtgctgtggagaatggaccggagggacaagaggggcagcagggatggtgggctggagtagggtgctggcaatgagggagtctggctcagatgtgggatgtgtatggaagaatataaatgatggtgtggatgtcagggtgagggaggagacaaaaccacgatgacccctagctttgtggcctgaactgtgggtggctgaggggatcgttaattgaatggggcagactgaggcttgtgaggaagatcagagtctggttcttgacatgagatgcccttcagacatctcttcactcaggtccaactagggatacagaaacactgaatatttcaacagcagaaattgaatggggggattgatagcgctggcgagggaagcagctggaaagagacagatggcaccctgagacagcccagaggtgaataggacccccaggctgcagggataaagctcagtggtggtgttacctcaccggggaccagggtcacacagcaaagctggaacaacagaggcgtgttgtgggggagcctcagaggggacaaaacctctgcctgagatcccaccccaggtgggcatgggggccactgaggttggggatgaaaatgccggtaccgtcagtgcacagccctgttccagacagtgctgcctggaagatttctgggctctcctgaggcgccaccccgcacctgagccacctccttggactcctgtcctctaccccttgaggacctccctcccttctaccctagctgtcttcttgaacttgggactctcctttcccaagacttccatcactagctcctggagggactggactttgcatcttcccttcgcgtggagcctcagtgtgagaggccctagccaatgcgtgcatgtcagaggtggtggggaccacatcagaagaagaggggggtgatgaaattaacaaataaaaagtatggggaaaacccaggtgtctgagcgcgtctgcacatgtcccagcagggctaggtctcaactctgacccagccccgcatgctggataacttggataattgcccttatgatggtgccacttccaagctggggtggctttgttcctggctgcccctcttaaagggggaagggggaagggggaagggtatgccccaacagaagcataataaataccaataaacagctcttgtttcccagaagggacgcgctgagggcagacgtgggcagtggaatttgacccttccctagatcttcctcagggaaaccccagtttggctcaggagggaaaacaggctgccttggtcccagctacggctttttgttgttgttttgttttgctttttgaggggacagagtctcactgttgcccaggctagtgtgcagtggtgtgatcttggctcactgcaacctctatatcccgggttcaagtgatttgcatgtctcagcctcccaagtagctgggattacaggcacgcgccaccatgcctggctaatttttttctatctttggaggagacaaggtttcaccatgttggccaggctggtttcaaactcctgacctcaagtggtccgcccaccttgactcccaaagtgctgggattacagtcatgagccactgcacttggcctttttctttttttttttgagacagggtgtctctttttctgtgacacaggctggagtgaagtgatggaatcattgctcactgaagccccaacttcctgggctcaggcgatccccccacttcagcctcccgagtagctggaactacagacgtgtaccacctcacccagctaatttttgtaattttggtagagatgaggtttcaccatgttgcccaggctggtcttgaattctggagctcaagtgatcctcccaccttggcctcccaaagtgttgggattataggtgtgagccaccatgcctagcccaggcacagattttattctgggccccaatagaagggttcaaaccagacagggctgagaatgaaatgagaccctagcacaatgagctttctttttttttttttttttttctctgagacggaatctcgctctgttgcccaggctggagtgcagtggtgcaatctcggctcactgcaggctctgcccaccgggttcacgccattctctcgcctcagcctcccgagtagctgggactacaggtgcccaccacctcgcctggctaattttttgtatttttagtagagacggggtttcaccgtggtagccaggatagtcttgatctcctgacctcgtgatccgcccgcctcccaaagtgctgggattacaggcgtgagccaccgcgcccagcccagtgagctttctctaatccattagagtcacagtcaaaaccgaaagcatcatgagagctgctttacctggcatgcacctaggcaaacaaaatccctgattcctcccaggtgggagctggagatctctgtcctctccatcagcctcagcagcataggcatcttgctgggtgtgttaaacaatgtatcttttctgcacatcccggctccaaagtgcaagctggtttcttcatcaggtgctcagcggaggacgatgtgtgggacccagagggtgtgtgagtctccattatgggccaggaataacactgtattttctttttcttttttttcggagatgctcttgcttcgtcactcaggctggagtgcagtgatgtgatcttggcgcactgtagcttcaacctcctggggtcaagtgatcctcccacctcagcctcctaagtagctgggactacagatgcacgccaccaggcccggctatttttttttggtatttttgtagagacaggttttcgctgtattgcccaggtttaacatggtatcttcatactttgtgggcaatttaagggatttccaggggttaccttgacctcacgtgagttttgcctttatgagctattagtagcacctaccctccaggatatgatcgtggacttgcatttatatgaactgagcagcacatgctggacagtttgcatagcatactgctgtggtttcatttggtctctccagcaatcatatgaggtcagtaacccgtaatccccatttgcagatgagaaaacaaaaggtcatagacatggtttagctgttgcatgagagctgtcaattgactctcagacctatgtgcctgaccaccaggctcttccacctcccaaggaaggaccccttaaattaggtcgacatagctgaaagctgtcccagcacacgtttagaggtgatgccacatgactacctgtacctcacagcaggaagggtgaggcttttccaagcatctgtaaccacaaatcaaaagggtcaacagtccacctcactcatgcctgtaatcccagcactttgagaggccaaggcaggcggatcacgaggtcaggagttcgagatcagcctgatccacatggtgaaaccctgtgtctactaaaaatacaaaaattagttgggcatggtggtgggcgcctgtaatctcagctactcgggaggctgaggcaggagaattgcttgaacctggaggcagagtttgcagtgagccaagattatgccactgtactccagcctaggcgacagagcaagactctgtctcaaaaaataaataaataaaaataaaaataaataaataaaagtacaaaaattggctgggcgtggtggcgaatgcctataatcccagctacttaggaggctgaggcaggagaatcgcttgaacccgggaggtggaggttgcagtgagccgagattgcaccactgtaccccagcctgggcaacaagagcgaaactccgtctcaaaaaacaaaaacaatagccaatttctgctagggataatgcagaatataccaactagaaagctaaggagtgtgagatttgctgccctgagagagggagtcctgagggcttggagttccacctgcatgagcagaaaggagctaagattctttaggactcctctgtgttatgcgtggacctctcaggtgaagtgtcttcctagcagtcatcctgtgactttgccctcctaagcagatgatttgcaccacgactgggccttttctctgggatgcatagccacactccctccgactctcacaagtgctctatggtacgtgttcctccctccacgtcagccctctgccgtcacttctccctgcacatacctgagtgcaagtggcgtatgctgaggtgggagagagtctgggcatggaaggctggatgcctggttctaggctatgtgcagctccaaaccccctggggatttcagggatagagggaatattttactgagggcctacagccctccaggcactgtgctgggtgcttggtgtgaatcttatcttgccaacatcactgggaggtgccagcttggttttccattttgcccattcgaaagctctgttgactaagaactcagggctaattaagagacgagccagattgtgacacaagcctgtctctgttgccccacacgttacctccaaagttgctttccttttctaagccaatgtcttctgattgcctagaatgggccccgcattgtgctgggggctggggacagagtagtgaataaggtctctgccctcatggagctgataagccagtgtggtgcccaataataagtaaatgatgctgcatgctggaaagtgatcagaaaaggcagtgagagagcaggcgtttggcacttgctattttgcttttttttttttttgagatggagtttcgttcttgttgtccaggctggagtgcaatggcgtggtctcagctccctgcaatctctgcctcccgggttcaaacgattctcttgcctcagcctcccaagtagctggtattacaggtgcctgtcaccacacctggctaattgttgtatttttagtagagacagggtttcactatgttagccaggctggttgtgaactcctgatctcaggtgatgcacccaccatggcctcccaaagtgctgggattacaggcatgagccactgcacccggcctgagacttgctatttaacataggtgggatgggaaggcctctcttgtaagacgatacatgagcagaaattagggagtgagccagagggacatttgagggaggagcaattccaggccaagggaacagccagtgcaaaggccctgagttggagtgtgcctgacatttcagagaaacaagactcatgtggttggagcaaagaaggaataaggggagatagggagacaaggtcacagagggaacaagagctatgtcctgtaggtccctgcaccacggtgaggactcaagcttccactctgtcagagatggcaccatgggaggattctgagcttgggaagaatgagctctgacgtaggtgttcacaggattcccctgggaggaagaggctaatggggtaggagagggtgggaagcccatggaggaagcccctgtgtccgtgttgaagaggagagtggctggaacaaggtcgggatagcagagtggagagaagtggtgagattctggatatattctgagagcagaaccagcagaatttgttgacagattggacgctgggtgagagagaaagtgactgagcaacggaacgggtagagtttgctctttcctggcatggcaaagactaggcagagtcagtttgggggttggggtacatcagcagttaggttttatatatgttaaatttgaggtggctgttagataccccgagggaagatgtcactcaatgagtggatacagctccagaaagagagagggagagataacagcaaataatagtaatatattaatattagaataggccgggcgtggtggctcacacctgtaatcccagcactttgggaggccaaggcgggtggatcacgaggtcaggagatcgagaccatcctggctaccacagtgaaaccccatctctactaaaaatacaaaaacattagccgtgcgtgatggcgggcgcctatagtcccagctactcaggacgctgaggcaggagaatcgcttgaacccgggaggcggagcttgcagtgagccaagatcatgccactgcactccagcctgggcgacagagtgagactctgtctcaaaaaaaaaaaaagatagttactatattatacatattatagtaatattaacaatgattttggccaggtgtggcggctcacccctgtaatcccagcactttggtaggccaagataggcagattgtttgaggtcaggagtttgagaccagcctggccaacatggcgaaaccctgtctctactaaaaatagaaaaattagccaggcgtggtggcacacgcttgcaatcccagctacttgtagggctgaggcacgagaattgcttgagccccggaggtggaggttgcagtgagctgagatcatgccactgcattccagtttgggtgacagagcgagattgtcttaagaaaacaaaaaacaatgattttgttttgttttaagacagggtctctctctgtcacctaggctggagtgcagtggcgtgatcacagctcactgcagccttgactttctggactcaagcaatcctcctgccatagcctccagaatagttggaactataggtgtgagccacatgcacagctaatttttttttttttttttttgagatggagtctcgctctgtcacccaggctggagtgcagtggtgcaatcttggctcactgcaagctccgcctcccgggttcatgccattctcctgcctcagcctcccgagtagctgggactacaggtgcccgccaccatgcccagctaattttttgtatttttattagagacggggtttcactgtgttagccaggatggtcttgatctcctgacctcgtgatccgcccacctcagcctcccaaagtgctgggattacaggcgtgagccaccgtgcccttgcccagctaatttttaagaatgtttttctttttctttttcttagacagggtctcatcttgtgagctcattgcaggcttcaccttctgggctcaagtgatcatcctaccttagcctctcagttagctgggacttcaggttcacgtcaccatgcccagctaatttttttcttttttttgagaaggagtcttgctctgtcatccaggctggagtgtagtggtgcaatctcggctcactgcaacctctgcctcccgggttcaagtgattctcctgcctcagcctcccaagtgcggggattacaggcacccaccaccatgcctgattaatttttgtatttttagtagagaaggggtttcaccatgttggccaggctggtcttgcactcctgacctcaggtgatccacctgcctccgcctcccaaagtgctgggattacaggcatgagccaccacgccccgcctcatgcctggttaatttttgtgtattttttgtagacacagttttgccatgttgcccaggctggtctcaaattcctgggctcaagcgatcctcctgcctcagcctcccaaagtgctgggattataggcgtgactgctcctggctcaaaaattttttgtagaggccgggcgcagtgactcatgcctgtaatcccagcactttgggaggccaaggtgggtggatcacgaggtcaggagattgagaccatcctggctaacacggtgaaaccctgtctctactaaaaaatacaaaaaattagccgggcatggtggcgggtgcctgtagtcccagctactcgggaggctgagacaggagaatggcgtgaacctgggaggcagagcttgcagtgagccaagattgcgccactgcactccagcctgggcgacagagcgagactccatctcaaaaaaaaaaaaaaaattttttttttcgtagagatgtctcgctgtgtcgcccatgctagtctccaaatcctgtcctgaagtgatcctcctgcctcagccctccgaaagcattgagattagaggcaggagccaacacatccagcccacagtgatttgagttcacactttggcctttccctgtgtaccatctcttgttctcacaatagccatatgacatgctagggactgttagtcctatagggggaatcaggttcagaaaggtttatgaattcactaagataacacagctaaatggtgaggagtcaagattagatcccaggtctgtccaattttgagacctgaacattttttgatctgctgttggttgcttttgcaggaaagagggttgattgaagtagacagtccctaaaaattcctttttaggccaggcgcggtggctcatgcctgtaatcccagcactttgggaggccaaggcgggaggatcacctgaggtcgggagttcgagatcagcctgaccaacatggagaaaccccgtctctactaaaaatgcaaaattagctggggatggtggcgcatgcctgtaatcccaactactcgggaggctgaggcaggagaatcgcttgaacccgggaggtggaggttgcagtgagctgagatcacaacattgcactccagcctgggcaacaagagcgaaactacgtctcaaaaaaaaaaaaaaaaaaaaggtccgggtgcggtggctcactcctgtaatcccagcattttgggaggccaaggcaggcggatcatgaggtcatgagattgagaccatcctggctaacacggtgaaaccctgtctctgctaaaaaaaaaaaaaaaaaattagttgggcgtggtggcgggcacctttagtcccagctactcgggaggctgaggcaggagaatggcgtgaacccggagcttacagtgagccaagatcgcgccactgcactccagcctgggcaacagagtgagactccgtctcaaaaaaaaaagaaaaaaaattcgtttttagctccagagagccttaagcttataagttctctgctttggagacaaaagtcccccacgcctgttcgaattgtgtgcaggccaacagtccatagatatggagcaagcaagggcgctctcctgttttttctttgaacttcagtgcctccgtcctcccaagactgactttctggttttgcttattttcagaatgcaggcagcttcaggcagggagtctgcagctaaagagttagtggttttactttgttagggtgagggcaactggggtttgggagggataacttgacaaagtcacacactgcctggcggggtcacacgtaggcatctgtcttgtccccacctctctcaccaatcctctctctccacccagattcctaccctgggacaaaatggatgtaggcggagttggttttcaggtttttattgtgggtgtatttctggcagcgggacaggggtggtgaggcagtccctcccaggagtggccagagaaggccagaggcgagactggtggaaaaggacggggaagacagggaacttccttactctcggatcttcagttcccgcgccatctggcagagggcgcagggcagacaaaaggtgagggccgcccagtcgtgcccgacggagccctagagggtaggagagagcggtcaggagccccgcggtgggtcccaggaggccagtccccagctccctgctcccgcgggtccccagcccggcgcgcacctggatgtggtagcgctcccgcatgccggtgcggatggagtgcaggcctccgggcaggtagggcgcgcagcagcactcgccaaagtcgtcggagatgcggcaggcaaggcacagaggagcaaaagtgccgcacagacctgggcggggcgcaggcgctcaggggcggggccagccggggcctcccgacggctccgccccggggggggcgcggttgattcgccgcggaggggcattgagggtcccagccaaggagaggtcccagagggaattagaggtccgaggagaggatggcttagcgattggaaggcagggtttttctttttttttttttcttctttttttttttttttagaaattggaggctgggtgcagtggcttacgcctgtaatcccagcactttgggaggcctaggcgggaggatcacgaggtcaggggtttgagaccagcctacccaacatagtgaaaccccgtctctactaaaaatacaaaaattagccgggcgtggtggtgtgtgcctgtaatctcagctactagggaggctgaggcaggagaatcgcttgaacccgggaagcggaggttgcagtgagcatagactgtgccattgcattccagcctgggcgacagagcaatactccgtctcaaaaaaaacaaaaaacaaaacaaaaaaaaaaacgaaagaaagaaaaaaaaagaaaaagaaattaaagtctcggtctgtcatccaggctggagtgcagtggtgtgatcacatgtctcactgtagcctcgacctcctgggctcaagcaatcctcccgcctcggcctcccgagtagctgggactactggtgtgtgccaccacctcgggctaattttattttttatttttatttttgagacggaatctcgctctgttgcccagactggagtgcagtggcgtgatctcggctcactgcaacctctgtctcccgggttcaatcaattctctttctcagcctcccgagtagctgagtttacaggcgcccgccaccacgcccggtttttttttttgtatttttagtagagacggggtttcaccatcttggccagactggtcttgaactcctgaccttgtggtccacctgccatggcctcccaaagtcctgggattacaggcgtgagccactgcgcccgacctattttttatttttatttttgtagagatggggatctcattatgttgcccaggctgatcttgaattcctggcctcaagggattgtcatgccttggcctcccaaagtgttgggattacaggcatgagccactgcactgggccaggagctagggtttgaagagggagttgggggtcacagtgaggaaagctgagcatgcaaaggggaggttgagggcctgataagttgagtgtgggaaggcatgaggtagtatcctaaggagtgttgggggtctgaggaaagggtgactgttagagtgggaattccaagtccagggaagggaggtgggagtggggttagcaagcggtgggaggaggttggaggtgagcttccctctcctgattccccccaaacccatcttccaccaggcctggagagggagcaggcaggcactcacagacaggcatgtcgttgcagcagtccgtgagacctgtgtgccagtcactgagctgggtctggtagcagctggtggtggcgcactggggctgactggtcacagggtaggacatagctgcagaggtgggagggtaggggtcagctggcagcctcgcagcatctcctgggccccgcacttcggccacccttccctgtgccgggcagtctgggcggggccgccaggccgcccactgaagggacaccactgtgcctcccccttcccttctgctacatctgggcaccggcaaccccagtctgtccctgttgctgctggctcctgcacgtctggttaggctgggggtgggggtctcctgcacatctgaggaagggtggggaccacatctgggtggggcctggcggtgccgcctcctcctccacgtctgggcctgggttctgggttgcagcatttctggggcctctggggtggaagcaggcgccgtctgtcttcgaagcaagggtgcccaggggagggaggcggccaggttccagtactgagagggttgctggtccacccagcggtcccacctttgcctttcacgttgtcgtgcatctcaaactgcatcttgctggccctgaggaggtggcgttggggacggcagaagtggctgtggcaacagtggcagagtctgtccaagggacgctggatactggggaggtgggggcaagggactggggcactgggggctgggctctcagggggaggggagctggggagaaagaggccaagtcagcctgtcaaccaggagagacatggaatagggaatggatagggcgggggcgagaaactcgcccatgtctttccaactgcccgacagattgcagaggaccctccccatacccgagatagagcttgagggagaacaagaaatggagatggacagagtcagagacaaggggagaaagatcagagccaggtgcccgtagagatgtcaccagtaatgcccacatgtgcccagcactttgactcctctgcaagcccatctcacagatgagcactgaggctcagagacatgaggaggaacgccccacgtctgacggcccaggccaagggggttcatagaggtgatgctgggccccaagacttctaaattcagctcagcacaccccagttaagaaggacagatttgggggcattgggaaggacagagatgtcccgagagaccgacaatcagcgatatgaaaggagacagagtgatatgagtgggatgaggaggagggagaacagagcagaggcgcccaacctcaaagaagagggctgcggaggggatgttcctacctgcaggatcgcgatggcagtgatggaggcagacgtgtggagacacgggcactgacttctccgtctcagcccagagccacttatatgggcggccacgcagccctgggcggggctctgacagaggtgcccagggagccaagccggtctgatcgaccctctccccacactgggatttcccgccctccctctccactcccatccccccacttctcctcctgcctcagctcccaggacccagggaaaagaaggtggcggggggtgggaggtttggcgggggcggggggccacagccgggtcaatgcgcagagaccaaaagagagggagagacagaaacacagtgtcagaaaggcaggcagggaagtccctctagacagaaaggagagagaggagattcagagagatggagagacgcaggaagatgtagagagatggagaggtgccaagaaacagaggggcacaaaaatgtgaaaagaaataacaagaagaggggagatgggccaggcatggtggctctcgcctgtaatcccaaccctgtaatcgcctgaggtgagaggatcgcttgagcccaggagttgaagaccagcctgggcaacatagggataccccatctctacaaaaaatacaaatagaattagccgggcatggtggcatgtgcctgtagtcccagctacttgagaggctgaggcaggaggatcgcttgagtccagaagtttgaggctgcagtgagccgtgttcccgccactacactccggcctcagtgacagagcaagaccctgtcttaaaaaaaaaaaaggaaagaaaaggggagatgggagacagaagagagacggagatggaaaagtggagaggcaggtggggggatcactgaacaggcttagagggcagggaaatggggagaggtgatgggtggggagagaaaaaggccgggtggagtgggagagagtgctgtgtgggactcccctttcagggtctcgctcatctctctcagtgatatccccactttcctgggagagggggacagtgtcctccccattcaagccaggagacacatggggggcagtgtgttttggggaatgactcatgttggaaccaaagtaaataaacacacctcaccccagctccaaattgggaagggaggaggctgggaactgaaaagccgcagttcctgaaggacgtggacgtcacctgggactcctgggtcctaatggagcaaaggagtgggggcttggacccctgggtctgagggaggaggggctggggccctggactcctgcgtctcatgaggccaggctgcacatccctcagtagggtaggggtcctgggattccacactgctgggctcctgagcagggaaggagctgggggtctgggtgcctgaatcgccaaagtttccccccaacaggcctgacggggttgggaggtgactcagtgagggaagcagcattagagctgggtggggttctcagcacgggtgtcaccccaaaaatgtaggaggcactagaaaactggggtgtcacctgcagagaaggtggtgtcatcaccccgccgggtatggggtgatggcaggtggatcaccctgctagctgggatcccaggtgtcccctccctccctccctccctccaacacattaggacccaagccttggtctcccagcaccacccagatggttgggtcttcctgtccccagaactcccggcagcgctcactgtcttgccggtgcacgtccgtcattggtcctagagcctggatgtctgggggacatctcctcacttgtgtcctaacatccctgtctcctcatctctgaatcttcgtctctcaccctgcatcttcacctttccagctgtgaatctgtctttctttcctcatctctgcaaatctctttccaaatctctgtctctccatctctgggtccctctccttccaggctctgtgtctctgtgcccttatcccggggtctctgtctcctatgtcaaaatctcttctgaatctcgcttcccatctctgttcatctccagacctgccctgtggaggcagctacagggccccatcccccctgctgtccagactaagggtgcaggtgactcaaggtcagtcatctccgaggaccccagggctcccagcatgacactctgagttgtcctcaagtttcctctctcactcctgacacagcctgggggccccaattagatctagcaattcatgcaggtgaggaaatagagactggggaagctgtgaggtggcctgcttgggggtgaggagggccgtgagcaggaggaggagctcctggggggctgaggagtgatggtggcccagtcaccaggcattggcctacatcctcctcaaacagggttgccacataaaatacaggctgtcctgtaaaatctgaaattcagataagcaacaaacaggttttttagcatgtttcatgcagtatttgggacatatttatactaaaaaagtatttgttatttatctaaaattcaaattaaattgggcttcctatagttttatttgctaaatctggaaccctaccatcaaagacagaggagttcaggactccagccccctcttttcccagaacctaggagtccaggccccagccttccctccttaggatctgcgagtccaggtcctaatcctcctcctcccccttagaaggaatggggcacccaaccccctcctcctttggaaatacaggagtccaggctcccagcccctttctccccagaacccaggcatccagaccaggtctcagtccagttgcccaatgtgggtcagtcatcactttgggtttcacaaggtgggttgtgccatctgtggccctggtggaaccggtccggcagagcggacaagtggcgtggtcccccttcccttcctcaacctgctgtttccttgaaggccagcccagcggggctgggagcagaacaggagggacttggggagctctgggtgtgcccctgtgtttgggtgtattgtgtctctgtgtgtggttgtgaccaattgtcatgacaacccccaactgtcatgatgtgtctctgtgctttttctgtggtctgcggtgtgatatgagagggtctcttctatttgtgtgtctgtattgccctcctgtgagtctacacactgtgcactgctgtttgggtgtgtttgcagttactgtgattctgtaattccggttggattaaggcagcaattatttattgaatggcagccttatgtgatggactctggagccagaaagcctgggttcaaattcgtgtttttttttttttttgagatggagtttcactcctgttgcccaggctggagtgcaatggtgtgatctcagctcaccgcaacctccacctcccaggttcaagcaattcacctgcctcagcctcccgagtagctgggattacaggcatgcaccaccatgcccggctaattttttgtatttttagtagagatggagtttctccattttggcagactggtctcgaactcccaacctcaggtgatcctcccacctcggcctcccagagtgctgggattataggcgtgagccaccgtgcccaccctcaaattctttttttattgagacaaagtctcactctgttccctaggctggagtgcaatgagtgggaggactcactgcagccttgacctccccgactcaagtgatcctcccacttgagcctcctgagtagctggggccacaggtgtgcaccaccatgccagctaatttctaaaatttttttgtagtgacggagtcttgctatgttgctcaggctggtctcaaactcctgggcccaagcaatccttctgcttcggcctcctaaagtgtcaggattaaaggcatgagccactatgcccagcctgggttcaatttctgactgctggctgggcacggtggctcacacctgtaatcccagcactttgggaggctgaggcaggcaggtcacttgagttcaggagttcaagaccagcctggtcaatatggtgaaaacccgtctccactaaaaacgcacacaaaaacccaggtgtggtggcatgtgcctgtagtcccagctatttgggaagttgaggcaggagaattgcttgaacccaggaggcggaggctgtagtgagccaagattgtgccactgcactctagcctgggtgacagagcgagactccatctcaaaaaaaaaaaaaaacaaaacccaccaaattctgaccacctgtcagtggctgtgaaaccttgggcaagtcactaaacttcttcagatatcaattttcccacctataagatgggttgttgcaaataaggttgtagagagcattaaataaaaagtgcggccaggcacagtggctcacgcctataatcccagcaccttgggaggctgaagtgggcggatcacctgaggtcaggagttcatgaccagcctggccaacatggtgaaaccccatctctactaaaaatacaaaaactagccgggcatggtggtgggtgcctgtagtcccagccacttgggaggctggggcaggataatcgcttgaacccgggaggcagaggttgcagtgagctgagatcgcaccactgcactccagcttgggtaacagagtgagaccccgcctcaaaaaaaaaaaaaagtgcttggaattgtgcctgtcacataggaaacattttttgttgctgctgctgatgacgatgatgtgttcttctggttgccggggatacagtagggaattaacccaggtctttgctcatggtcctcctggtaggagctggatgagtggcctctcagtgactggccatgtaactgcatcgctggggtgtctgttttgcatgtggaataggatatttcttgtgtgctgtgatcacgggcgattctgtggttgtgtgcctatatttgtgtttgtgcttgtaggtgattatattgctgcatgtgtgtgattctttgtgtgggtgcaaatgcaagatcaaatctaacacaaattgtgatggcacgtgtttggtgtgatcttgcatttctgattctgaggtgctgggagtgtgtctataattggaatcttgagaacccttctctcagctgtgaggccactcccttacataacatcccataggtgacccctgggagagatccttccaagatgagccttggtttctccctaatggggatagtgggcccagtggctcaaggagaaacaggagattgaaagggaaggtgggaggggaccagtgaggccagggagagggtaagagacgtgatggtgacacagaaaaacgatggctggattgggacagaggaagagctgcccagagacggggatctctgtccattcattccatgagcatttcctgagcccctgcaatgtgccaggacctctggtcggttcagggtctgggggaaagcagagagacccagagagatgacccccaccaggaaagctgttgctgccccaaggtggcccactgcctccacaatgggcctcagtgacagttctgagtgaccgagatgcagtgatggggagggacagagaaggccagatctgtccagatcaaagaacagaggccatgggggaaaggtcccttccaggcgaaggagaccgccatgaatcatgttcttatcacctcctaataggctcatgatgcaagtgcacctcctaatcactattttcgaccccaaccaggctcacgcccacagtcagaagggttggacaagcttagtatcgtggattcacgggagaaaatatctgggagaccccatccttggacctgctttccccaggacccaggagtccgggtccccagctctccagttccccagccccaggagtcccagctctcagcccctctccttttgtttgttgcctgcgttttcttttttctctctgggcctgtaactctttgtttatctccatctatgttttgtgtctctcttgtatctttacatctgtatctggattctccctcactaggcctcaattttctcacttgtaaactggggataatactactaataataatccaatctctcagagctgtggcgaggaagacatgagataattatgtaaaatgctcagcacagaaccaggccacagtaaactcagtacaagagagctctgttattattactgttttatttttgccatctcccctttggtatctctatttttctcttagtctcacgtgagtctccagtctcctctagctctgggttccttttgcagacagcacctgcctctgacttcccttttcgggatgaggaaagggcatatccaggccagagcttcccctgagcctcttccttctccctctccattacaagctccgcctcattacccagaacacttgcctgggggtaaggcctggctcccttcccataaatagcctcataaaatcctgaaccccaaacctgtcatccctgggcgggcgagtgactcaagatcccggagttcccgctcctagacaccaaaccttcaggtttccagccccctcctccctctgacccaggagtccgggcccctagtccctccttcctcgggtcccagacttctcctccttcagaaccaaggagtctgaactctcaaatccccaaccttcctcaagacccaaggatcgggtcagcaaacagcctaggtatgtggggccagaaactccattcacgaccattctgcgaccgtctacgcccagggctcccaccccgactcagtccctccggaggcgggtccgacacgcgaggcgcttctttggagtctggcggcgaaagctatccatgacgtcagtcactatcttccagccaatggacactcggccttctacctccctgggccactcaggaccctttgcctggtaggcggggcccacagcccaactcgggcagcgataggctttcggagacgccagtctctgccaggcccagtcagtcggccaatagacccggaacctgagggatcggaatcctggtccactccgcagaggcccgagcgggctcgcgagggaacgggttctccgagtctggccgggtaagccctttccagcacgcctagtattaggattctgcacatagctcgggtggaaaaccgtgaggcttagtgaggcttgaggcggaggggggaggagctcagtcccggcgaacccatcttgctttcttggagaaactgagaccgggatactggatctgttattcatccatccgttcctcccaccctaagcctgattctcgtctgctcctgccttcctgttccttcatccgttctgcccttcctgccctcaattctctcactcacggattccctcgtctagccactcactcacacactctcccacctattagttagacaaacatttcctgaggcttctggtgtgccaagcctcgtgctgggcgatgctggtgaccaagatgagtcaggcctgggccgtgccctcaaggagcccgggtcagatgggaggatggacgttgatgggcatgggtgtgcggagacggtgggagcccaggagagacttttttgagtttggcgtggtcgggaaagggtttccaggggaggggccattggagctggatcttggaggagcagaaggtgccaggcaaagtggagatgccaggcaaaatgggtgtggggagggtgtttcagcgtgaccaaagacagggaggcatgcaggagcagtactgcgtgcaggtgcctaagcggaaggccagtcaagtctgtatggccagcaggggaactgtaaggctggaggaggccgaagagatgagcagaggccaggctgaggagcttggactttgtcctgagggtgagggggtagtggagagccatggaagggttgagagtagtggaggacaaggtcatagttggtccagaactggaggaatgagactggaagccagtagcccaggaggtggctctggcagggattcaggtaggagagagtggagcctggatcagggaagaggccgaggggataagatagagattcaggaggcaaggcttggtgctgtggctcgtgtctgtaatcccagcactttggaaagttgaggcgggaagatcacttgagccaaggagttcaagaccagcctgggcaacatagtgacagcctcatctctacaaaaaattagccaggtgtggccaggcgcggtgactcactcctgtagtcccagcactttgggaggccgaggcgggtggatcacgaggtcaggagttcaagaccagcctggccaagatggtgaaaccctgtctttactaaaaatgcaaaaaattagacaggcttggtggtgggcacctgtaatcccagctactcgggaggctaaggcagaaaattgcttgaacccaggacggggaggttgcagtgagctgagatcgcgccactgcaccccagcctgggccacagagtgagactcaaaataaaaaaaaaaaaaagaaaaattagccaggtgtggtggtgcatgcctatggtccaagctactgaggaggctgaagcaggaggatcacttgagcccgggaagtcgaggctgcagtgagccaagatggtgccactgcactccaacctgcacaagagtgagaccttatctcaaaaaaaaaaaaaaaaaaaaagaaagaaagaaaaataaataaggagattcaggaggcagagagaacagaaagtggggattgatgggctatgggacaaggggttgtccagcatgagacccagagctctagtctggaggacagtggagccatctctgaggtggggacaggaaaagaggagcaggttgatgggtagtgactgttttgacagaggtgaccaaggggttctatgagttggacaaggagagtggtgactcaggccagtggatctggaccttcaggaagagttctgggctacagctccctgccccagcacaggccctgactcagaagtcacttgctgggtgaacgaggacctctgagctgaggatcccttgcttcgcaccccgtgaggaaacggctttcttgtttctgcatcttcagtctctcccactcctccagcattcaaacatgtccatcatctctaaacacatgtgccctgtatcaggctctcttgtggcgcccactggctcaatcccttaccttccactccctcttcaacccactatgtctggctgcctaacggccatgaccctgcagtggctctggacaaggtcactgaggtcacctgctcattgctgacacctgagggtaacatttcaatcctcatctgacctggtccactccctgaaactcccttcaccctacatcctccttcctgggcagcttcctccctctctggctgctccttagaacccgccagccttgccttccactgcccacccccgcccacccctttactaggggtgtgatcctcagggctgtctctgtcctggccctcttgttgcttgtcccacctgcccaggcttcctggaaaggttctagtcccttggttccacctagactgcatttttttttttttttgaggcagagtctcattctattgcccagactggagtgcagtggtgcagtctcggccgactgcaacttctgccttccaggttcaagcgattctcttgcctcagcctctcagttagttgggattacaggcgtgcaccaccacacctggctaatttttgtatttttagtagagacagtgtttcaccatgttggctgggctagtcttgaactcctgacctcaggtgatccacccgcctcagcctcccaaagtgctgggattacaggtgtgagccaccacacccagccccagactgcacttctgacccttgttgtctcctggattgtcttcctgagaccttccagctcaccatgtccagaatggccctccacaggtcccacctgtcacacacacacctgagcctcctcccattgaagagacagcttcactgtccacctgcttccatggccagacctgggtgtcatctctgtccccttgctgtcctgtaacctcatcagtaggtgctgtccttcccaccttttatggctctgggatgctacacctacactccctacccttacggctcctgccccagctcaggcatcctccttggcctgtaggactccagttttgcccttttctgtccatcccccagtgtcccagcaggatctttcagtgccctgagctgaccctggccctttcctgctcaaagtgctcctgtggctccccactgccctccagtttagtccaaatcgtactccaggctcttcaggccctgctcctgctgaccactccaggcccctcacgcccctccccactttgcacctgaccttctggtcaggtggaagctttttctagccaggtggcagctttgatcactgccagctggctctcacaacctggcatgttttttcttcctagcagacttttgttcatcctgtagtgtcaagctcagatcaccacctctgtgaagccctccctgactaccacaggtggaacccctggggactgtgacagcctgtgtctgttcttccaccctctctgaatccaggatcagaagccctttgaaggcatgtcttgggtataaatcatctcaactccaaactcagggcttacaaggggccagagagttggtccaagagttgattgtcacagctggacagagcttgcatttccagtttttgtttttttggaaacagggtcccactcttgcccaagttggagtgcagtggtgcgatcatagctcactgcaacctcgaactcctgggcttaagtgatcctcctgcctcaccctcctgagtaggtaggactgcaggagtgtgccaccacgcccggctaatttttaaatgtttttgtagagactggtctatgttgcccaggctggtctcaaacccctggactcaagctatcctcctgtcttgcctcccaaagtgctgggattacaggcgtgaacctccgtgcccggctgcatttacagtattttgagcgccagtttgtttctgatttcctgctaactttgctccagttctgtagggtgtttgggtcactggagcctttgagacccgagagattatttttaacttttatatccccctgatggatgctgagcctggtctccctgggaccagggtgagtccagctaaccgaaggtcttcaaggggaggagctgaggacccagcatctcctggcagtgtacctggatgaagtccgaggggaggtgggtccgggttaccaaggagtccactcccttctggtcccaaaaatccagtcccccatacccctcattccaggtttcttggttcccagccgcttgagtccgatgctgccccctggtgggcaaacaccccaccgtatttgagagaggccaaactaattaaatacttttatttacaacaaaccaaaccgacctgcaagggagggccagtccccgtccctgcggcggtcgccgcagcagcagcagcaaaaggcagcggtggcgtgcaggtccagccgtctcggtgaccggtgtgtgtgcgcgtccccctccccgtggcgagggtctcagctttcgggcccccgccccgcccccttgccacccccgacttaagtaaggcacagcccgcgtccccttccgcccggcccggaaggcattcatgacggaggccggcgcagatgggaacaacaggcttttagtgtcgccccccgcagcccccgtctacccccgcagcccccgtctccccgctcggcccggctccggcgggaggagtgaggacgaggcggatgcgctccacgcacagctctgcggcctggcgcgtctcgcggcacagcgccgctagggtcaggaagccgtgcggcaggtcctccaccacgcgcagcgtcaccggctggcccaggttgcgcagtcgccgcgcgagcatgaccgagtcgtccagcatggggtccagcgcgcacgcctacgggacagcggggagggacgtggagagagggtgggggacagacagaccggggtcgggtagagcgaggaggggtttgatgaacaaagggagcgggaaatacggatacagacggagtggacggaggcaggagacatggtgggtgaggagttggggagagaatggagggaatggggggagttgtgggaaggatgggagaatgactttaactgcgatccccggcctctctccagcctctccctccccaccccgccaaacccaccttttttttctcttgattctccaagcccaaggggctgccccactgatcctgtctcttggtactcaaaattgcaaagtaaaacggaggcagccctgactcttgtcctcctcccgttcgttcggggcattgttctcccctggggacacgcctgtccctttctccccactccggagctctttttcccaggtgtacccgtgcccggtccccctcctccccgggtgccctgctcttctctaaatgcacctgtaccggccccctctgtcgctcaccacgatgtgcacaggtggcaggctcttgagcatgctgtcgggtgccagcagcggcgacatgaaggggttcttgactatgggtgaggagtagaggggcatctgtgtggcaccctggctggagcgtcgggggtggaaaccctcggggaaggcggcacggacgcccaggcctctgtccatggggctcagctcatttttggcctcagcctcttcccctgcatcctcaggtggtaataagaagttgacatcggagggtgtggaggggctaagtgtctcagctgacagcgacatctcgggggtgtccgacgacgtctcggagtttcccctcaggctcaagtccctcagggtcaggttcttgagggaatccgtgcccagtgggccctggggctgggccagtgctgcttcagacacactgcggcgcatcggctctgagagagggagagcagataggcctggctccgttagtttggttgtgtgtgtggctggcagggaatgccatgggaagggcagtcgcctgtggagcgctgtgaaaggctgtgtttccccagactcttgcctaggggatgggtggagttccagatgccccaggtggtcatggtgggggtcttggcagtggggcagtgtgttctagtgaaggatgtgtgtgtgtgtgtgtgtgtgtgtgtgtgtgtgtgtgtgtgtgtgtgtgtgactgggaagattaggtgcagtttacctctaggaacctattttttcttctagatcaaggaaatgaaaatagtccttggttcataggtggcaggactcagtgggataagatgtgggattaggtaccgctacccactggggatcataatatatcgttttttgtttttttttttttgagacaaagtctcgctctgtcacccaggctggagtgcagtggcaagaacatggctcactgcaacctccacctcccaggttcaagtgattctcgtgcctcagcttcctgagtagctgggactataggcatgtgccaccatgcccggctaatttttgtgttttttttttagcagagatggggtttcgccatgttggccaggctgttctcgaattcctggcctcaagtgatccgctcgcctcggcctcccatagtgctgggattacacttaccacaaggtgtaaatggatcaaaatgatttgaatagtaagcaggcccagtggcttgaagggaggctctgttcacagggagctaacaagtctccagggtgtatcacatttctaggggtctggcacctgtagccacatggatctgcttccccacatttcctttgtgttcttcagttttatccgttcacgtgaccaggcaagcaagtgcccaaacgatgctaaagatacacttccagcccacctggcgtgcccagcttggcctcagctctgttcattttatcagacccacactgcctaccatgagggccaagatgctacagttttagttttttactttttttttttttttttgagatggagtcttgctctgttgcccaggctggagtgcagtggtgcgatctcggctcactgtaacctctgcctcccgggttcaagcaattctcccgccacagcctcctgagtagctgggattacaggcatgccaccatgtccagctactttttgtattttttttttttttgagacagtctcactctgttacccaggcttgagtgcagtggcgtgatctcggctcactgcaacctcgtctcttgggttcaagtgattctcctgcctcagcctcctgagtagctgggattacagatgcatgccaccatgcccggctaatttttgtatttttagtagggatggggtttcaccatgttggtcaggctggtctcaaactcctgacctcgtgatctgcccgcctcggcctcccaaagtgctgggattacaggtatgagccattgcgcctggcccatttttgtatttttaatagagatggggtttcactatgttggccaagctggtcttgaactcctgacctcaagtgatccgcctgccttggcttcccaaagtgttgggattatgggcgtaagccaccacacccagccttacttgtctttataaatctacgaaggtgaggtgcaaaacaatgtgagaataactacttaagtactttgtggcccagagggtcactggaacagaatggacacaccaggggtgctggcatcttctaatagcacctactgggtgccatatattgtactggccaaatggttggaggcagacctcaccacagcccagtaagcgtactctttttttaaatttttttttttgagacaaggtatcgctgtgtcacccaggctggagtacagaggctcagtcttggctcactgcaacctctgctacccaggttcaagcggttctcatgcttcagcctctctggtagctgggactacaggtgtactccaccataccctgctaatttatttttttgtagagaaggggttttgccatattggccaggctggtctcgaactcctgacctcaagtgatctgcccaccttggcctcccaaagtgctgggattacaggtgtgcaccaccacacctggctaatatttttgtacttttactagagacagggtttcgtcatgttgaccaggctgatcttgaacccctgacctcaagtgatctgcccacctcagcctcccaaagtgctgggattgcaggtctgaaccaccatgcccagcatcttccctgggacttttgctgtgctaggctgtccctcctgcccaccctggctgggcatgtgacgggagtgaatcactcacctgctatgggctccgacatcttctgggacttgcgcccacttaactccaggaaggagttgagccatgaggaggcacccaggcggaagtctcggaggagcagggctgtgtcccgccgcaccagccccatcatgccgagggctttctggtctgagttggagtggtcctccgtctttgcacctgcagaatatatgtgggtagctgagttgttttcccctttctgggcccagttttaacgcccagaacttcaggcatctgtggtcccagggacccgagaatatccaatcgcttcaaaagggataaggaggctgggcgcagtggctcacgcctgtagtcccagtactttgggaggccaaggcgagaggatggcttgagcccaggagttcaagaccagcctgggcaacatagcgaaaaacacaaaaattagctgggcgtggtagtggtggtgcacgcctgtagttccagctacttgggaagctgaggcaggatgattgcttcagcctgggaggtcaaggctgcagtgaggtgtgtttgagccactgcactcagcctgagcgacatgacaccttgtgtctgtctgtctctctctctctctcacacacacacacacacacacacacacacacacacacacacacgaaaaaaaagggacaaggagtcttagattcctctgcctggcctctccttcctcagtcacaggagtcctggtccccagcccgtccctgcaggagtcagacatccatgcagtcctgtttccctgctgagggtgtgggcctcaccagcataggcgctgacacacttggagagcacactgaggggcagcaaggggtccatgaggctcagcaggcgggagggagaggcggcaggctgcagcattgtggccgggtaggctgccatgatgccatctggcacccgcaccccgtaggctgctgcccgaagagccacggtgaagcagaggttcccgcctgcactgtcccccgcaaggcagattcgttcccctgttgagcctggtttgggagaggggtggttggtgacaacctggcaggggcagaggcctggggaggagggcagggaggaactcaagctgggagaactgggctctccaaggtggggtgtggggcactccaaggcctagcagactgcagttttagagactggcagactgaggcacagatttgggctcatgtggtagacagagggtcaggatgactcaggacctggagaggcccagggaagcactgggaaagtctgtcggggctggaggttgggagcagggagggcaggtggtgggaaaggggagctgagctcaggcctgttgcaggaggggggcctcagagggcgggaatggaaggtcagggttcagggtcagtacagaggggctgggctgcaagctctgtgccctggggcatggccacactctgctctgtgcctcagtgtcctcccaagatgttgatcttcgaagagggaggtcagagaagctggactgtgggccaggaggctggtaggacaggagagcagggcctggagctatcagagggggacgacagaggcccagggagacaggacggtgggtgggaagtggaggtggaggagatggagagtctgggtgccacagttggggacagaggataaagtggctgaggtggaagattgggcaggacctgggtgagcaggagctgggaggtgtggggggagagaaaggtagagggtgtgaggctgaggctggaggagcttaaagcaagctgggtgggatgggagcaggcgcaggtggctgtgggggcctgaggctcaccaaggagggcgcagtgcttgatggcccagcagtaggcgaagaagcactcctccagcgcacgggggaagggggcctcaggggccagggagtagtcgatggagatgatgggggcgcccagctcctgggcccagctcttgaggtagggctcgtgggatctggaggtctgggccacaaagccaccgccgtggaagtgcactatcagggaccgcgagcggggtgcctgctgggggcgcggccacagctccaggctccgttggccgttggactttatcaggctgctgagctcctcactgtcctgggggtgaggagggagacggtgtgtgaggttggggagagctggccagggctgcacccctccatggggatgccaaggtgggggctgcccacgctcctcggctctgtccctgtccctggctgaggctggaaccctacctgtccttcacgcaggtcataggagatgagcctgacgaggacgggcccagggcctgtgtgggccagtgggggtgagatggtgaccgtgagcgtggggtcggcagtcagtggcatctcaaaggcttcgggtggcaggctgagcaggcggcttaccctcacggtggccgatgccatgttggccagagactggagggaggggacagaaggggtgctagggaaggtctgcctgcaggggtgcccttcacctctccctctgatccccagtctttccccttgtgtgccatccctgggcctggagccccacagagacctactgtggcctcagatgagtctctgggcctcagtgtccccatctgcaacaggccctcaccgatagcacttccatctcggtgatgttccagaaggctttccagaagtgcacgtccaggttctgtgtgatccgctcaaactcagccccacgcagctcggggtcgatggcaaagcggccgctggtgaagagagagctggcggccacacctaggggtcagaaggggtgtcagggagccccagtgggtcaggctgcttgggcaggagtggggaggagggccaagagagtaggctgcgagtagaacctggctgggactcactgaggcctgtctcgttgcgtttgtagtgctccccgaaggacaccagcccaatggagatggtctgcaggaatggccggatggcaggcgtgaactgtggagagacgcggctgcgtcacccaccgctcaagagagggatggggacagggcaggagcgaggcacagggatgtgcggggaagacacattcattcagtaaacgtttcatgagctcctactgtgtgctgggcatagctctcggctggttcacggacctgatgttctcaaagggaaaacaaatgatcagcagataagcaaagccacgcgcagtatcatgacaaggaatgacgaatggtttggaaaaaaaaaaaggcagtaggtggagagggcaccagtgatgactaggggtcaggctacttagcgggtctcggaggagagatctgactgaagcgaggggagggtgttccctgcacagggaacagagagcatgaaggcttaaaggtgagctcataggaggctgaggcaggagaatcgcttgaacccaggaggcagaggttgcagtgagtggagatcacaccactgcactccagcctgggcgacagagcgagactctgtctctaaaaaaaaaaaaaggtgagctcatgcttggtgcttgacctgggtagcgacagtcagggggccagtgtggctggagcagagtgagcagtggggagaggggcaggtggtgacattggagaggcaaagggggctcatatagggcctgggcagaggaatttggatttcattcccagtgcggggtggtgccactggtaggctgtgaggtggggagtaggatggtgcagggacttcctgaaagtcagagagaggatggatggggagaggaggcagctggaagacaggaacagggagatggccagagacagccccccaggcacagggacctgaggcagaaagacagtcagagagggagactgaggcctagacataggaccagccagccaccacgggggcagggagagacagcgtctgacagagcagacaggcagttaaggaaagacagtggggtccaggtgcagtggctcatgcctgtaaacccagtactttgggaggccaaggtgggtggatcacttgaggtcaggagtttgagaccagcctggccaacatggtgaaaccccatctctactaaacaaaatacaaaaaaaaaaaaaaaaaaaaatacaatggggacacaggattagaggaaatggagccataggaggccaaggcaagggattggcgggttcttctgttcactctgtactggccaagttcctactgcatgctagacactgggctggagcagtgaccaagacaggggaggcctctgccctcccggggacggacattttaaaggggagactgccctgcaccaaggcagagctgggccctgcccctggctgtgcgcccagtaggccagagggcacctgatgcctggctattgtggctgggatgctggtttgggcagccccgggatctctttctcatgactctagggtcacggctgggacacagggaggagctggctggcccagctgggctgatcaatacttgtgggttcagccctggtgaggggaggtttccaggaatgcctgggctgggttgctgaggataggctagcctgaagggaagcctggagatgtggggtgggagggggaggctgaggtgcggggaggcccagagagggccagaatgactatagggtcacatggctccagatccctccctgaggggtctcaaactcaagtgacttcaggggccagacaggtaacaaagagtgaatacatctcttgcatgtaggacaatagagagtagtggatatcctggtgaaaaaagctctgcaagttgcatttcttaccacctagcagatatgacctagggaccatgagtttgagacccctggtgcagctctgtctgagctccagccaacttctcctttctgtacctgctgtttgctgagtccgataatgctgaccactggttactttaccatactataggccaggccaggggccaccaggtgccttcattgtgggcccagaggggcacggggcagggggctcacctggaagcccaggcagcggccatagaagcatcccttatgcagcgtgacatactcccggaggaagtcggcggtgagcccctcgtcgccctcaaagaagagtacccccggccgattggtaaccagcaggcgctgggcgtagtagaccagagcgcggagctgggtgagggcagccaggtaggcctccagctcggccaggttgtggctggtgcggaagaagatgctgcggcggttggaggccacatagcgggatttgtgcaggaggtgcgccaggcagcagcgggctgtgtgcactaggctgcggtacccgttggccggtgtctctgggtccaggtcaaagaggtgcgccacacccagcaggcggcccagggccggctccagccccagcgcctgctcccgtacaccggcaaaaacgcctgacagccgctgggccgtttccccaggaccctggctcgagaagaaggctatgttgtcctccgccagagtcaccagcgactgtgtcattgtgcgcaggtccatgttgtggatgagccttgaggctgtgggcaggtggggaggcctgttaggtggggctggatcaagccttgcttagctggggcccaggagtctgggccatagcttacccactcctccttcaaacctcagtgctgtcttctttcagttccaggggcccaggaccccaggttcctcctcccttagacataagaggtcaccctcttgtctctgggaatcagaagtttggggccccagttcccagtgcctttgtccctcctcgggagccaggagtttgggccctcagctccctcctccctcagacccaggagtccaagccccaagcccttcctcttcaggacccaggagcccctgctatcacctctttgggactcagaaacttgctgccctggcctcctgaatccggacattccctgagcccacacgactctgcttccctaactcattcacctctcctgtgatccaggaggctgccggtccttctttcttccttccaggaacccaagagtctagtcacctgtctccatgaattctcctggggcccaagactccttctcctagattccaagaagtctaaacctccagttggtccccattctcaggacccaggagtccgggtcccccatcccatctttccttcttaggccccaagtgctacccataggcccttcccctccaacaacatttgggagagttcagccccagccctcccattcccatctctcgggaccctggtccccaagcgcagctctccctgaactcaggagttcacaattctagacttcactgaagagtcattcctcatccttcaagtctggctgtggaaccccctccaaatcccagttccctccctgtttctctgtgagatccccaaaactcagtcttgcttctcccccagtggggtcccctggccttcaggcttgtccactggtcctgggttgcatggccggccctgctcccctgcctggaacagcgatactcatcactggtgtcgaccttgagcatatccgtgcaggtcccgtgctgagagctttctgtgtgtttgctgctttagcgtgctaaccctctgggacccacaccacctaggttcaaatctctattattgccagcatccccattttacaggagaggaaactgaggctcaggttttaagtgaggaggttaaagttgcactgcaagtggcagagcttttgtaaacccagctctctgggtccacagccacacttatgtggggctccccgctaggactctggaagccacatctcaaaacttgccctggactacgtctgatctccacactttccagtccccagtgatctttcctctgatatcctttcccagccattcaggctgccctgtttcttggatgccctgtcacccaggtcctgaacaagctgcccttggtggaatgctaccatctgctccagtgacttccctcccaaagcccagcaccttgcctgttcccctagaagaaggtatttcctttcccttctaggtcctggggcctggcagcggccattcccgtctctcagctggctggacactcacccctcctaggcatcttccgagcttccctgggctgggactgctggtctgtggcttgtgccagtagcagcctggggcaataaacccgggggcggggctggcctgcccagggtgtagccgcacaagccacctcccacccagaaagatcagtgaggaccacgtgctgtaaacagagtagagggctcagctccctgctctgccccccacctgctcccagactcagctcaactggtagtcctgttacaggctcctctgccttagaacccaggagtccacacccacagcccctcctccctcagacccaggagtccaggcccccagccccttcatcctttaggacccaggagtcctagccccagtcctgaacaaaccgtcccctctcacccagccaggctgccctctctgtccccagagaggactcagggagccaaaggcccagtgatctcagctcccgcctcctagtctggccctggcacagccagccccagctgttggggggagagaggaggtagccagccctgcctgtccctcctggaaggacaaaagccgattaagggcagtgccaggctcagctaggggcctgagctgcctgtcggtcctactgggtggtgtgaccacactgggtaacctggacctgccacttacccctctcagcccaccctgctgtgactggcatccccacctcacacagggaaacagaggctcagagagagagattcctcacccatgtcattcacccgtgtcattccacagattccttgtctggcctcagcttgtcacttccaagaggtactccccagttgcttctccccagctaagatatgcacgcccccgttattttctgccatgatatttagttctgttccatcctgccatttgacactttataatttgtttacgtgtttgttcatctcccccaggacaggactaggttttatggagccatgaaacttataaggtaccggggtgtggccctttaggaagaagaaatacagaattacaaatacaagattagggccttgggccaggcgtggtggctcacgcctgtaatcccagcattttgggaggccgaggcgggcggatcatgaggtcagcagatcaagaccatcctggctaacacggtgaaaccccgtctctactaaaaatacaaaaaaattagccgggcatggtggtgggcacctgtagtcccagctactcgggaggcggaggcaggagaatggtgtgaacctgggacgcggagcttgcactgagccaagatcgtgccactgcactccagcctgggtgacagagcgagactctgtcttaaaacaaaacaaaaaagattagggccttgaaaggggcctgtgtgactgaggggctctgaggcctcagggtcatttgcttggctggaagtgaatcttctgtcccggactgtcatcccccaggtggccctggggcctatcatgggacctggcacatagcaggtgctcagtggatatatgaagcaggaaggaaggcatgaagaagcagagcgagggcagaggggctagttagctcaggagaggacggcccctccccagggctggcagacagatggatagacagaggcctcaggaggcagtgttaggcttgcagctgtgaaaatgggacgatgtgggctaggcacagtggctcatgcctataatgccagcacgttgggaggccgacgtgggtgggccacgaggtcaggagatcgagaccatcctggccaacatgctgaaaccccgtctctactaaaaatacaaaaattagcggtatggtggtggatgcctgtagtccccactattgggaggctgagacaggagaatcacttgaacccaggaggcagaggttgcagtgagctgagatcacgccactgtactccagcctggcgataaagcgagactctgtcagaaaagaaaggaaagaaagaaaggaaaggaaggaaagaaagaaaggaaagaagaaaagaaaaggaaagaaagatggcccaagcccttgctggcgaccctggatgagtctgttttcctcatctggaaactgcacttggctgttctgctggctcagggtgggagacataatttataagtggggccatggccggcatgttctgcatgtggtttgctttgtgggctcacttggccttcctgagatggtgtattgggtgatttttctctgcggcacttgtcaccatctagcatactatacagtttactacaggaataccttgcttcactgtgcctcgcacatactgcattttttacaaattgaaggtttgtggcaaccctgcgtcaaaccagtctgttggcaccatttttctgacagcagttgctcactttgtgtctctgtgtcacattctggtaattttcacagtgtttcacactttttcattattattatatttgttatgatgatctgtgatcaatgatctctggtgttactattgtgagtgggggcaccaccaaccatgtccacgtaagagggcgaactttaccgattaatgctgtgtgtgttctgactgctccactgaccagccatttcccccatctctcttctcgagcctccatattccctaagacatacaatattgaggccgggcacggtggctaatgcctgtaatcccagcactttgggaggctgaggcaggtggatcacttgaggtcaggaggttgagaccagcctggccaacatgctgaaaccccatctctactaaaaatacaaaaattagctgggcatggtggtgtgtgcctgtaatcccagctactcgggaggctgaggcaggagaatcgcttgaacccgggaggtggaggttgtagtgagccaagatcacaccattgtactccagcctggaaaatagagcgagagtctgtctcaaataaatgaaatgagatgaaaaatagaataaaataaaatagaaatcaggccaattaacaaccctacaatgacctcaaagtgttcaagtgaaagaagagtcttatgtctctcattttaaatcaaaagccagaagtgattaagcttagtgaggaaggcatgtccagtgctgaaacgggctaaaaactaggcctcttctgccagttagctaagttgtgaatgcaaaggaaaaattcatgaaagtaattaaaagtgctactccagtgaacacatgaatgataagaaagtgaaccagtcttagctgggcatggtggctcatgcctgtaatcccagcactttgggaggccgaggcgggcggatcacgaagtcaggagatcgggaccatcctggctaacacggtgaaaccccagctctactaaaaatacaaaaaatcagccgggcgtggtggtgggtgcctgtagtcccagctactagggaggctgaggcaggagaatggcgtgaacctgggaagcggagcttgtagtgagccgagatcgcgccactgcactccagcctgggtgacagagtgagactccgtctggaaaaaaaaaaaaaaagtgaactaggcttattgtggatatggagaaagtctgaacggtctggatagaaggtcaaaccagccacatttccttaagccaaagcctaatcccaagcgaagccctatccctcttcaattctttgaagggtgagagaggtgaggaagctgcagaaaaaaggttggaagctagcagaggtggattcatgagatttaaggaaagaaggcatctctgtaacataaaagtgcagggtgacggccgggcatcgtggctcacgattgtaatcccagcactttgggaggctgaggcaggtggatcacctgaggtcgggagtttgaaaccagcctgaccaacatggagaaaccccatctcaacttaaaatacaaaaaagaagccgggcgtggtggcgcatgcctgtaatcccagctacttgggaggctgaggcaggagaatcacttgaacctgggaggcggtggttgcagtgagccgagatcgtgccattgcactccagcctgagcaacaagagtgaaactttgtctcaaaaaaaaaagtgcaaggtgatgtagcaagtgctgctggaggagccgcagcaagttatgcagaagatctagctaagatcattgatgaagacggctacattaagcaacatattttcagtgtagataaaaccaccaggtattggaagaagatgccatccaggactttcctagctggaggggaggtcagtgcctgggcgccaaagcttcaaggccaggctgacccccttgttaggggctaatgcagctggtgactcagttgaagccggtgttcatttatcattccagaaattctagggccctcaggattacgccaaatgtactctgcctatgctcttaaatggaacaaagcctggatgacagcacgtctgtttacagcatggtttactgaatatttcaagcccactgttgagacggactgcacagaaaacaacaaaatatttctcaatgacaatgcatgtggttaccaaagggccctggtggagtagattaatgtgttttcatgcccgctaacacatgatctgttctgcagcccaccagccaaggagtaatttcgacttttaagtcttgttatttgttattattattatatttttttgagacggagtctcgctctgtcgcccaggttggagtgcagtggcgcaatctcagctcactgcaagctccgcctcccgggttcacgccattctcctgcctcagcctcctgagtagctgggacgacaggcgcccgccaccacacctggctaattttttgtatttttagtagagacggggtttcaccatgttagctaggatggtctcgatctcctgacctcgtgattcgcctgcctcggcctcccaaaatgctgggattacaggcgtgagccactgcgcccggccaatttcaacttttaagtcttattatttgttattcttatttttaaaatttttagttttagagatggattcttgctgtgtcacctgggctggagtgtagtggcacgatcatacctcactgcagccttgaacttctgggctcaagtgatcctcctacttcagcctcctgagtagtggggactacagatgggcaccactatgcctggttcatttttttttttccaggtttttagagacagagtcttgctatattgcctaggctggttttgaattccaggcctcaagagatcctcctgccttggcctcttgagtagctgggagagtcactgcatctggctaattttttgtgttttttaagagacagggctgtgttgcctagcctggtcttgaacactggacctcaagtgatcatcctgcctcagcctcttgaatagctgggattacaggcatgtgccaccatgcccagctctaagtcttattaaataataaaaaatagaaatacatttagaaatacattttgtaggctgggtgcagtggctcatacttataatcgcagcactttgggaggccaaggcaggaagatagcttgaggccagtttgagatcaacctgggtaacatagtgagaccctccccctctacaaaaaataaataaaaaaataaaaaaacagaaatacatttgatagcaggaacaatggcaacaaaggatttagactatgacatagacttggctgatagagcaccagcaggctttgacaggactgacccccatttttttttttttttgagacaagtttcgctcttgttgcccaggctggagtgcaatggtgcgatctcagctcaccgcaacctccgcctcccaggttcaagtgattctcctacctcagcctcctgagtagctgggactacaggtgcctgccaccgcgcctggttaattttagtatttttagtagagacggggttttaccatgttggccaggctggcctcaaactcctgaccttgggtgatttgcccacctcggcctcccaaagtgctgggattataggtgtgagccaccgtgcctggcctgaccccaattttgaaagttctactgtggaccaaatgctatcaaacagcatcacatgttacagagaacagttttgtgagtgaatcgaagcagaaaagttcattgttaccttattttaagaaactgccacagccactttctacaaccaccaccctcgtgagtcagcagccaccaccactggggcaagaccctccaccagcaaaaagatgaggatttgctgaaggctcagatgatcattagcatagtatggggccaggcgtggtagctcatgcttgtaatcctggcactttgggaggtcaaagcaggaggctcacttgaggctaggagttcgagactagcctgggcaacatagtgagattccgtctctacagaaaaaaaaaaattaaaatatgtacatggtatttttagacatatgctgttgtacactttaatagactacaggatagtgtaaacataacttttctatgcactgggaaaccaacaaatttgtgtgactcactttatcaagtggtctggaattgaaccccaaatatctctgagacatgcctgaatttatattgtttgctctctgattccctcactagattgtaaactccctgagggcagggacttttgccttttttattcagcctttggacagtgcctggtgcactgccgccccttggtaaagtggtagcatccatgccggtagggatcttttaagatgaggagtgggggccgggcgccgtggctcacacctgtaatcccaccactttgggaggctgaggccggtggatcacctgagatcgggagttcgagaccagcctggccaacatggagaaaccctgtctctactaaaaatacaaaattagccgggcatggtggcgcgtgcctgtagtcccagctactcgggaggctgaggcaggagaatcgcttgaacctgggaggcagaggttgcggtgagccaagatcacaccattgcactccagcctcggcaacaagacagaaactctgtctcaaaaaaattaaaataaaataaataaaaagatgaggagaggggacatttccaacaaaacaagtgactgcacaaaggagtggggaaggggctggacccaggccctagggactccagagctctgccctttgtcctgttccaggcggctccccgaggactgggctgggtggagctggcaggaagggatgctgaggttgccagcaactcgccaggaatccctggcagagggcactggggcaggggtaggcccactggggccgtgggtaaggactaggggagaggtagggcagaggggatttggctttgggtggtgtcccactgactgggcactggacctttctttgccctgaagagtttctggacagctgaatccgactcctggggactgagcaggggtaaggagggcggtggggaaggaagtggggtgggggtggatgggggatggaggaagggccaggtgtggggcctgggaggaagcaaaggcttctgaagccaggaagcctggaatcagatgcaggtggggacaatgagtggctggatccccgagagtgtgtgcataaaagagcaaacgttgcaccaacagcctctgcgtgcctggtctctttctctgtgcgtgtgtgtgtttaatttaaaaatagggatcgagtctagctgtgttgcctagactggtctcgaactcctgtgctcaagcaatcctcctgccttggtctcccaaagtgctgggatttcttttcttttttttttttttttcattctcaaaggaggtgatgagatttctttatgtgttttatgtgaagtgactcatgtcgcctgccccacaacctatgagggagagaccattatcatcccttttggcagatgacaaaattgaggcacagaaaggtgacataacccccggggtcacacggccagcagggggcagctccagggcagagctgctgatctctgctgtgtttctgtgtgctgctccctctgtctgtgcttcaaagtatatgctttctggtcgggtgtgagtgtgtctggggttcacgtgtacatatgtacctctgcaggtatgtgtcatggctggcgtgtgtcctggcctgtgtccgtcggcactggtacatttgaaggtatgaatgtttgtatgcctgtgaatgtatctgtgtctctgtttctcttggcctgtgagcttgtgtgggcgtgtttgtttatgtatgaatggatatacatgcttgtgcgtgtcttggtctctgtgtgtgtgttgagaacaaacctctccccatttgctcaagctggaacccaggatgtcatcctggccacctccccaccccccaactcccatgcaatccatcccctagtcctgcccactatgcctactaaaggcctctggaacctggcccttctccccacctccactgcctcctccctggtccaggcggtagcatcattacctgggtgactatgacagatctttatatatttctgattttgttctctttgatttgttgtccacatagcagccacaggatctttttagcacacaaatctgttcacacacttccaacccttcaacaccccctcccttgctttcaggataaagcccccaatcctgcacatggcctcccaagccaggtaccatcctcctctctctctctctttttgagacaaagtctcattgttgcccaggctggagtagagtggtgcgatcacagctcactgcagcctcaacctcctgggctcaattgatcctcccacctcagcctcccaagtagctgggactacaggtacaccccaccatgcccggctaatgtttgtgtttttggtagagacggggtctcgctatgttgcccacgctggcctcaaactcctggactcaaggggtcctcccaccttggcctcccaaagtgccaggattacaggtgtgagccgctgtacccagctaccatcctcctctcttaaactgcctgccctgtttcctcttcctcttcctcctggccctggctgagctccctctgcactgtaactcagtgtttcctcaagcctcgggtctttctccatactgtcctctctgttcccctgcctgccccctgcacagcacttaacgcctgtccatcttgggtccaatattgcctccttgggaagcctctcaattctatcttcccagggtgtttttctctgttgtatttatcacagtttacaatcatagtcttatctgagtaatatctgtgtccccagctcaactgtgaatctgtcagcccaggcctggcacagctcagtgttcagtgaatgtctgctgaatgaatctgtgtgactggaacctcttgggcccagaatcaagtttgggcccacagcagttgtgcgtccacaaactccctgccccgaggaggctgaggcagccatctctttgccctcactggccaagtaaggaagcccaggcggccttggtccctcagagccccagtgtcgtcatctgggaaatggggtgatcctaaggacactagcctcatccagttactggcaagatgaaactgatgacgaggattgctccagccagcccagatgcccttgaggcaggagtgaggtctgattaatttatctaaagcctggcacgagggcggggcttcaggaaatgacaggcaaatcttggagtttgcaggaatgagcctttgtgaatggctcgttttgcagggagccctgcccaactggattctgactcctcatgacaaccctaagggaagcgtgattattatgatctctgttacagttcacacattccttcacttattaatccaataaatatttgagtgcctatttgcctggcataccaggctctagaaatacagggtaaacaaggcagatacagccctgcttttaggatgttcaccgtccggtggggactaacagtaacaataaccttcacttctcctgagggtttgctgcgtgcctgtgccaaacgctctacattcattctaacctcacaaaaggaggtactcctatcatcatacccattttagagctcagaaagctgaggcagggaaagagggagtctcctgcccagaacatcacagctcccagcctgaggaaccggatctccgacgcccacgtttcttaactacagtctgtactgcctctgggtatgctatactggtgtgaggctcagtgtcttgctgtgacagcgagtgcccttgggctccagtccgtctgccctctgagcctgtctgagcctgcgtgtgtctgaagccaactccaggtctattctgggctaatgatgtgttctacggcaggggaagcaatgagtttggggtccctggggctgaggggtggtgttagtttccttcctgcatgggaacctcccacgggtccccatgctgattgataaatgcttgtaactgaggacctgcccctgcctgaggcttgcagcatttctgttggtctgtcagcctttgttccgccttttgagacctgaaaataatgtgacaccctagagaaatgaggccttcccttttgctgaggcaggtgtggaggtctgaagccaagccagggcccgttgtcctggaaagggtaggggtcagggctaggccccagtggagccggctgaagcgggttgactgacaatgaatggatggatggatggactgacttgccgggtgggaggccgggactgcgatgaactttactggccccgctgcactctccactatgggcaccccttcctcctacctctccttgactcaccgctagacttcctctttgagtaacacctgctaacctccttcccccttatcctctcaagagcgctggagccctgaacatcggcgcttgaagcattccccaggtgggaaacactgagggcatccgttgcccttggtcacacagcgaatacggaatccgagcgggaaccctggtccacgaagctcgcattccggactctgctcccaagccgatccgggcgtcagctagtccctgtgccagggtgggcctctcggctgtcacatcacccccttctcacaatggatcatcccgttgtccccgcaagcggcaatgggccagtccgcggacccccccaactccctgtggcagtgggccagtccacgctgtccccactgccccgtaggatgtacgaggttccttccgggctgctgccggtctccgcgcgctcacctttggccttgtcttttcgccaccgccggcgaccgtggctccttgagccctctttggcattcttcgaggccggggccatagcggcctcggcgggctccgttcccccggccaactccatcaattccccgcggtcctcccgcgggggccaattccagccgcgaggccctgcccggagggccaatcctcgctacacactactgtcgggcccccctattacccaatcccgagcttgctcttctctgggtccagctccctaaccaattctggtctccctccgctgccgtgctccgcccccaaccgccagaatttaagatctggctccgccccctaccgcgcattaaagggctcgcggccaacaaaaaggcaaccccgggggtggcgaaaagcgtccttcgggcaggactagtgcggagccccgcggggagcaccccagcagggaagtcccgatcttcccacgtgctgggaagcctcccatgtgctggctcagtctcgccatcccactcaccttcccagggagggatgccctagcacgcggcccggcccgccttttgaagggggaaagtggggcgcctctgagcctctgcctggggtgggggcgggccaggtcctctgccaactcaaagacgaggcggggcgccagcgctggaggcgtggctgtgcctgagagccgttggaggagggagccccgctttccctctcctgtctcctagttctcctattgcgcttttcctgggggatctttctccctctgtctccgccccctaatccatgctcccgataatgagggtgggggatggtggtaggagaacgctcggcgcctgcgcactagcttcaggccgcgggccggcccaagagcggaggtagagggaacgacgcatgcttgagaaatggcgggaaacagaggaggctcgaggcttgctcacacgcacacagccaactgcttctggaccgccttgctcacacgcacacagccaactgcttctggaccgcctgaaaggcaacctcgcccgccgcggtggtgtggggcgggcatcccttgagactgtgctctggaggcctggagaaacagctttctatcctcagcactggggagagcaggcctcaatccctgcctttgcctgccgcccctcttccttccctctcaaagcatacccagcagccccggcgctgagaaacgcgttactctcttatcagctgtgggagagacaagacagactggcctctgggcggaggggccgccattgcctgccctctggaccagggcctcacagataccctcagcttcaggattagggctgcgttggtttttccccccacatcaggggacttcaacaagtaacctccagttccatagataaaacttgtattccccccttctccatggcaggggttttgagcctagagaaggaagatcggagcttcctggggctcctgtgaagcaggcagggggcagcactgggccccgggaagaggcggagaaggcgagggagtgcctgcggtgagcccagagccttgggcccgttatcctctgatgctgctcccccaactttcctgccgtcagtccctgaccttgcctgagaccttggcggctcccgcacctctctcccggctcctccttgctgagaacacaacccgcaaggcccttccgcctggctggactgagtcccctatggaggcagcctggcagggagcaggtatcttcctggcagaagaggacagacctggtaaactgagagactgttgatgccccaatgttctgcctagcctgcctggaaactccagaagggtaaggtaccgtctttgtattgtattgctgggacttacgcccgtgtctaccccagagctggtgctcagtcagtttctgtggatggatgaatgaacactggcaagagggccgctttcctggtctcctggtccctagctcagagtgccttcccactctgggatttgattttccccaaatcctctatagggaggcagcctggtccaggggagaaagaccccggcttcaaatcctgactttgccacttcctaactgcatggccctgtgcaagaacccttacttctttattttctacctgatgtcctcatttctaaaatgaggatgttggccaggtgctcggtggctcatgcctgtaatctcagcactttgggaagctgaggtgggaggcttgcttggggccaggagttcgagaccagcctgggcaacatagcgaggccacgtctctacggaaaatgtaaaaattagcggggcatggtggtgcacttgtagtcccacctactccggaggctgaggtatgaggatcgcttgagcccaggagtttgaggctgcagtgagccatgatcataccagtgcaccccagcctgggcgacagagtgagactttgtttttttctttttttgagatggagtcttactctgtcacccaggctggagtgcagtggcacgatctcagctcattgcaacctttgcctcccgggttcaagtgtttctctgcctcagcctcccgagtagctgggattacaggcacctgccaccacgcctggctaatttttgtatttttagtagagacggtgtttcaccatcttggctaggctggtcttgaactcctggcctcaagcaatccatctgcctcggcctcccaaagtgctgggattacaggtgtgagccactgcgcccagccttttttttttttttttttttttttaataatggggatgttgatctttatctcaggattgttgaaggatgaccagagctaacctgatacaccgtaagtttttagtattttttaagtaaatgaatgactgtccctgagaggcttcaattcctccagattcacactcacctgtatcctggtagtgtctgtgattccgagcactggttttctcatgtggcgacgtcccactgtatcctgacatcactttataaccagattttcctttgaagcctagcttcactccctgggccaccattccacccatcgtggctggagaatctgtgtctgaagatgatcccacatctgattctgactcagaatctgtgacccactcagaaagtgccttccactctagggctgatcgctgtatggatagttcctgaagttttgttagaaatcccagctctgtcaaagatccctgcttggatttggctccctggactggcgttgtttgcttgtctgactgttcaggtgtctcttgggacgtagattcagtcggggcagatggctcccttttggctccaggtttagcctgggccgcaggtgttgattcagcttcttgttgagctggaggtggctctcctggcccaggccctggctgggctacatgtctttgtctcaatgctggctcctgttgagttatagattcttttcctagcccaggtccctgctgggaggcagcttcctgttgagtgagcagcaccctttggatgtaaggtgattgctgtggtgcgggcttctgtggggcaagaaattcctcttgtgaagcagatttttgttgggctctaggttccttctgggattcagcatcatgttgtgcaggggtctcctgctgggtgaggggtctttggtttgaagcaggcttctgttgggtattggatccctgcagagtcttcgattctggctgggctatgggtgtcttttctggcccaggctctagcggggttataggcctctggtgtggttcaggttgccagtctgacctagacactgacttagaacctggctccattgttatttccctcacgggagatattgatcttccaggttctatccttctgggctcccacccagccctctctcttcacagatctctcattgattcctcatgatggcacttcctcttgggtttcactccatcctagcatcactggtcttcctttttaaggcagctggcagttggccgatcacagctggcccccactaagtaatgaactctgtgcctctttctttggtgggaggattaggaataggaggaggctatgtgcctagcactctcttacaagaagggaggggcttgctctcttgtgtcataaatagggccccaccccacccaccactccgttaaaatgtttcttctcataaggcaagcatcccaatttaggcctccgtgtcatctgggatgacagaagccagatgctggatgagtgttccttttttctctttccttctaatgtctgaggaaagcgtcattcagggggcagtctctgtagttgttgtaataattatttccctctttgttcattcctacaaatggttgccagattatttatttatttacttattgagacaagtctttctctgttgcccaggctggagtgcagtggtaccattttggctcactgaagcctccacctcctgggttcaagcgactctcctgcctcagcctcccaagtagctgggactacaggcgtgcactgccacgcccggctaatttttatatttttagtagagatggggttttgccatgttggccaggctggtctcaaactcctgaccttaagtgatccacccccaccccccgcccccgggcctcccaaagtgctgggtttacaggtgtgagccaccacgcccagccaggttgctagtttaatttccttatattgtcattctgatcatttaactctcatgttaaaaactaatgtcatgccttcccacttttatagcttgaggcccttctgaatggcatttgagatactccatgccatctctctagccctgaactatgatcctgtactagattggaaactcacagaagacagtgaccactgatgacaatgactgataatgatggtggtaatggtgatgatagtagtcataaataccaaaggctgcctaagtgctaagaaactgtgccaagttttttttttaaacctatattatctttaataagaccgtgtctggttcattggtatgcttttttttttttgtcccacctcgctcttacctcagaaagatttgtcgaatgagtgaaagatgaacaagtaggccaatggagacagagtgagggtcttggtggggataagtatgtgtagaatctggattcagtctgcagtgaatagggtaaaatgggtcatctggttgtgaattggcagaccccatttgaaggaaacaattttgatctgtgacatttaaaaatatttattgacttctgtttgctactttcctgattgcatttaaggttaaatgacactagctaggaagctacagtttcctggaatctttcaggtaattaagcctaagcctgggtaaggggagggcacaggctaagactgacgagagaagaagacactagagagagcaacaaacaaaatgatcttgaaaaacatgctttttgagagcactggaatgatttaggggtgggtacagtgggagagtgaggtgggagaagaagagtgtctggtaggtgtgctcactgtcttcttggctgagaatgtttaattggaagagtgggcgctcagagctcctacaaaggcagagcaaagcttcttagctgacattgtttgagaaattgctggcaggctctggaatgcttgtttggctttctgtggtgcctttggtgtcctagggtgcaaataaaggggagaggctagtgttaaaaccatttttaacatttcttttttttttggagacggagtcttgctctattgcccaggctggagtgcagtggcaggatctcaactcactgcaacctctgcctcccgggttcaagtgattctcctgcctcagcctcccaagtagctgggattacaggtgcctgccaccatggctggctaatttttgtattttagtagagacagggtttcaccattttggccaggctggtctggaactcctgacgtcatgtgatccacccacctcggcctcccaaagtgctaggattacaggcatgagccaccatgcctggccttcacatttaatttttttttgagatggagtctcgttcagttgcccaggctggagtgcagtggtgcaatcttggctcactgcaaccactgtctcccagattcaagcgattctcctgtctcagcctctcgagtagctgggattacaggcacccaccatcatgcctggctaatttttgtattttagtagagatggggtttcaccatgttggccaggctggtcttgaactcctgacctcaggtgatccacccgcttttgcctcccaaaatgctaggattacaggtgtgagccactgtgcccagccaacatttaatttttatgagagttttaaaaattataaaaataagactcatccagtggaaaaaaattttaaaatccagtaaaaagtaaaaggactcctcccaccccagcctctacaacacattttccagggctaaccactgttaatagtttgctacgtatttttccataccttctggtatataaatacaatggtttattttaaaaacaaaaatgagattatactatacgtattgccttagtcggcacctttaagaaatctggccgggcatagtggcttgtgcctataatctcagcactttgggaggccgaggtgggcagattgcctgagcccaggagttaaagaccagcctgagcaacatggcgaaatcctatctctacaaaaatacaaaaattagccaggcatggtggcgtgtacctgtggttccagttgctggggaggctgaggcaggaggaatgtttcagcccaggaggtgagccgtgatcatgccactgcactccagcctgggtgacagagcaagaccttgtctcaactgcgcccctccctctgcaaaaaaaacaactgaatctattattgcaaagtattatatatctatagaagttcatagaaacctatacatgcaattcaataaatagttataaagcagatattcatgaaactactacctaggcttagaaatagaatattgtgtccgggcacggtggctcatgcctgtaatccctgcactttgggagcccgaggcaggcagatcacctgaggtcaggggttcgagaccagcctgaccaacatggagaaatccatctctactaaaaatacaaaattagctgggtgtggtggcgcatccctgtaatcccagctcctcaggaggctgaggcaggagaattgcttcaacccgggaggcggaggttgcagtgagccgagattgcgctattgcactccagcctgggcaacaagagcagaactccatctcaaaaaaaaaaaaaaaagaaagaaagaaagaaatagaatattgccaacagcacccctccttttctgatcactgctttctctccccctcacagtgataatcttgacttttatagtaattatttactttcttttctttattatttaccacctatgtgtatagattcctaaataatttagtttattttttctcatttttaaactttatgtatatattatggtctgaatgtttatgtctctccccattttttttgtttttgtttttgagatggagtctcactctgttgtccaggctggagtgcagtggcgtgatcttggctcactgcaacctctgcctcccgggttcaaataattctcctgtctcagcctcctaagtagctgggattacagatgtgcaccatcacgcccggctaatttttttgtattttaagtagagacggggtttcaccatgttggccaggctggtctcgaactcctgacctcaggtgatccccctgccttggcctcccaaagtgctgggattacaggcatgaaccactgcacctggcctcactttagttttaattcacattttccttgtaataataaggttgagtgccattgcatctgtttattagctgtttgggtttcatcatctgtgaagtggctattcaagtatttttgcccgtttgtctgttgtatttcctgccctcctctcactggtctgtagcaattccttatatatgtattctgaatactaatcctttgaaggttgtgtatgttacagatatcgtctcctatttggcagcttgtcattttattcttttgatgatcaaaatttcataatctcagtgaagtcagatttatttactcttttactttatggtttgtgcattttgtattttgtttaagaaaggctttcatacctcaaggttgtgaatatattctcctgtatttccttgtaaatttgtctttcaaatttagatctgtaatccacctgaaacttacgttaatgaaggatgtgaaatagggggtctctacatcatttttttttcattaatatattgtggatatctctccagccaacacataatgatttatctcattattattattattatttttattattattgttattattatatttattttagagacaggatcttgctatgttgcccaggctggtcttgagctccttggcttactggatcctcctgcctcagcctcctgagtagctaggattataggcctgagccactgcccctggtttacttaattatttttgacagtaattagtttttcccaatttgcctttgaagaaaatttcccccatttatttgtcaatacaaatactgctataattaatattcttgtacctatattttgagcatccatgctagtattccattgttgagatttcctaaagtaagattactaaagttattatactcatttacaattttgatacagccaaatttattttacttccgtcaatagtgtataaggatcctgatatatcccattcttgataatatcataatatcaatcagtttaacatttgccaatttagtttttttttttttttttttttgaggcagagtctcactctgtcgcccaggctggagtgcagtggcatgatctcaactctctgcaacctccacctcccggattaaagcaattcgcgtgcctcaacctcccgagtagctgggattacaggcatgcaccactatgccccgctaatttttgtatttttagtagagacggggtttcaccatgttggccaggctggtcttgaactcctggcctcaagcaatccgcctgcctcggcctcccaaagtactgggattacaggcatgagccactgtgcccggctgccaatttactttttatatgacacttaaaaactggtagactaaactgggtgtggtggtgtgtacctctaaccccagatccttgggaggctgtggtggaaggatcacttgagcccaggagtttgagaccaacctgggcaacatggcaagaccccctactcaaaaaacagaacaaaataacaaacacaaaactgctagactagggaggagtcaaattctgtttgatgctgacactggtgtaatcttcagagattaatgaccagatctccaacagccccatctacccccactttggtaaacagtgaggttttaaaatctaagaatttggttaaacctttccagtatcaggaaaattgtatcctgcttttcctctcttcctatttcccgacaaggtgacattgagtagaaagggctgagttgtgtgcttatcctggtcttaatttcacctcttttttctattctcaacgtgcttcttccctagtgatttcacggagtgactctggtataaggaaaatcatcctttggaaacttacttgttttcttcacattgcccttgaaatgatcacaggggcactgcttctttggcagcccagacactgtcatgaattttcttctcggggctctcaggaaccaatctggaacaacagcattgctgcttagatgggagagttaatacatttgataggagggagtaggacagagctttaatcgccatcttctgtgccttgcatttccactgcaatggggtgggaaaaggggtcaacagagaacagtgtccatccagctatttgaatgccagtatttctgagttgtttttcctgacaactttgggcaaggtttgggcaagggtttgggcaagggtttggtggcaggtttggagggtgcatcagaatatcattactccaaagaatgaggagtaaggcttgggtgtctgcttttcagtggctactttcccttggggaagccattttgcctctctgctttcagtcttgcctgtgagtaaaataaggctgagaataggattcaggaagcttttggaaggccaggaaaaaataaaaaggcttttggacggtagctctgggttcttcaggaaaaggataaggggcagggcgcagcctgacatttggctggctttcccctagaccttggagaagtccagttcttgcctgagagtcaggaagaaagtgggcacaggtgctgcatgtggcaggctgtggagaggggaatgggtgaggtcagctgagataacatctgcattggtctcagaggggcccaagggagagagctggggtcatggtgatgccatcgctgttgttgttgctgaattactgacctttgcactcacattcttggccgccttcctggagccatctcctagaagcctggcctcggtccctgtggcctctggcgacccctgtcggaaggaaacaggtcacatccagacactggaaagggcacagaaatgatcctcccagcattgttctacctaggtcagcacagttccatttttccatttttacttcaagaatctaggttacttcaagagatgaatattttatttttatttatatttttgagatggggtcttgctgtgttgcctaggctggtcttgaactcttgggctccagtggtcctcctgccttggcctcccaaagtgctaggattataggcgtgagccactgtgcccagctgaggggtattttaatcgataagggattgaggtttaaaatctggcctatacataagcatattcaaaaatttaatgattaaaaaaatctggcctagagaaaagcttagctgaaggtaggtggagaaagaatggcttctagatggaagagatgataaaaggcaggggtttgtcgaaacctcctgccctctcctcatacctcacattaaaatcctcatgacttaaaagagtgagagcgaggaggagattattccttaaatcaagattttcccttgacctccaagttgctgggttttttgtttgtttgtttgttttttgagacagagtctcactctgtcatccaggctggagtgtagtggtgcaatcacggctcactgcagccttgacctcctgggtttggttggtcctcccatctcagcctcctgggtagctgaggcttcaggcatgcaccaccactcctggctagttttttgtattttttgtaaagatagggttttgccaagttgcccaggttggtctggagctcatgggcgtaagcgatccgcctgtcttggcctcccaaagtgctgtgattataggcatgagccaccacacccaccccaagtagctgtatttgaatccagagtcccagttcaactattaaacgatggtatttacctttgttcctctggaacaaatacattcttcttttggcctttatccgagcctgttttattttccgattctatcttatctccattttttgatacttaaaatattcctatgacaggctgggcacggtggctcatgcctggaatcccagcactttgggaggctgaggcaggcggatcatgaggtcaggaggtcaagaccatcctggctaacatggtgaaaccccgtctctactaaaaatacaaaaaattaggcgggcgtggtggcgggcgcctgtagtcccagctactcgggaggctgaggcaggagaatctcttgaccccaggaggcggaagttgcagtgagctgagatcgtaccattgtactccatcctgggcgacagagcgagacacggtctcaaaaaaaaaaaaaaaattcctaagacaatcaagaatgatggtttatagacttgagattctcaagtaagagcttggctcagatgacacttcctttatggtagtttctgatatttcctgtcaacatgaattataccttcatatggttcccattgttgttgaatgcagttctgttattgcactgtaatgttgttgtttgaaatcttttatggactgaattgtgtctcccgaaattcacatgttgaatccataacccccagtacctcagaatgactgtatatggagataggacctttaaagaggtgattaaaatcaggctgttatggtgggccctacaccagtctgcctggtgtccttataagaaaaggagatttgggctgggcgcggtggctcatgcctataatctcagcaatttgggaggccgaggtgggtgaatcacaggtcaggagtttgagaccagcctggccaacatagtgaaaccctgtctttactaaaaatacaaaaatgagcagggcatggtggcgcgtgcctgtagtcccagctacttggaaggctgaggcaggagaattgcttgaacccgggaggcaaaggttgcagtgagctgagatcataccattgcactccagcatgggcaacaaagcaagactttgtctaaaaaaaaaaaaaaaaagtaggggggatcctagagagctctttcattctctttccacctcttgaagataagaggagaagtccactgtctgcaacctggaagaggacccttgccagaacccagctgtgctggcaccctgatttcatatatccagcctgcagaactgtgaggaataaatttctcttgtttatgccacccagtctgtggtattgtgttatggcattcctagcaaactaaaataaaatatttctccttcactagactctgaaccattggttcagtagtcattcaggtacgtggttcctaacacatggtaggcatttggcaaatgtttgttcaacacgtggatggataagttgtttggagaggacccttagagatcatatggttcaattcaggcctcctacttcccagacttctgccacacagatggagggggttgcgtcatttccccaagggctgcttttccaatgttctcatgtgctgttttgagtgttatcaaagtaatttaagcaggcataggtcctgccatttaaacttttctaacatttttactcttgcctgacctctactcctagttccagagaaaaaccacagaatattagaccttgaaggaaatcccagagattatttaattgaattccttaattctgaagtttttttttttttcagtctaaatgtaatttaactgttggagaaaattttgaaagtacaaacagagaaattattattcttaccaactgttggtattttggcatatttgttacctacatatgctttttattaatatagtgataaccatagcatgtaaacacattctctttttccattcataggcatgttgctgtgtcatcttcataacacatttttaatgaatgcataatactctcaataattatgtgttccaaattatttaactgctttcccattgctgaatatttagaaagttttattttttagatgttggtaaatttctttgttcttgtaactgttttccaaattttagattattttcttgagagagagttcccaaagtggaattactgggtcaaaagttaagaattgctttcagaagagctatactaatgtttaaattttttttcatttaattatttatttattttttttgagacggagtctcactctgtcgcccaggctggagtgcagtgttgtgatctcggctcactgcaacctctgcctctcgggttcaagcaattctccttcctcagcctcccaagtagctgggattacaggcacccaccaccatgcctggctaatttttgtatttttagtagaggcaggttttaccatgttggtcaggctggtcttgaactcttaacctcaagtgatccgctcccctcggcctcccaaagcgttgggattataggcatgagatgctatgcctggccactttatactttttctctaaacaaatttattttgcaaaacatcctcatcctatgcaatattatctgtgaaattacaggtttgatgtatgcttagttttttcctaacatgcattggaataaacacataaatattaaagtaaaaagaagcttatttactttccacctaaaatcagttttgggaaccactgatacagtggcataagcatgcactttatatccacataggcctggggtcagctactggctctgtcacttaactgtcgacttggacaagtcacttggcttctatgatccttgattccctgatttgtgaaaggagggtggtaaaatcctccttgcagagttgttgggaataagtgagctgctgtgggagcccagtgtccaggcgggtgttgagtacatgatggttatcattgtgtttattgctgtggaattctggttattttccaaagtgagtgtctatgctggaatattgggcttgtggctttctgctgatgtggatgtgtaaagaagttacttccacttgttaggatttgtggtgcatctgtcattattttcacttcccagatccactacatatttgctttgtgattttggacaaagttgtgtaacttttctgtgcctcattttcctaatttgtaagatgtggttaataatattcctcccttatccacaggggatgcattccaagacccccaagatacttcaagtctcagatagtaccaaaccctatatatatattttttctacacatatacacttacgataaagtctaatttatgaattaggcacagtaagagattaacaataagatagaacaattttaaaaatatactgtaataggccaggtgggggctcacacctgtaatcccagcactttgggaggccgaggcaggcggatcacgaggtcaggagattgagaccatcctggctaacacggtgaaaccccatctctactaaaaatacaaaaaattagccaggtgtggtggcgcacgcctttagtcccagctactcgggaggctgaggcaggagaatggtgtgaacccaggaggcagagcttgcagtgagccgagattgcaccactgcactccagcctgggcgacaagagactctgtctcaaaaaaaaaaaaaaaaaaaaaaaaaaaatatatatatatatatatatatataaaatacacacacacacacacacacacacacatatatactgtaatgaaaatgacgtgaatgtggtctctctctctctttgtctctttctcaagataacaatatttttggaccactgttggcgggtaactgaaactgcgattaagtggggactactgtacatgagtgtgcgtgtgtgttatttcccagctctgaccactagagggcctagaagcaccagcacctactagcaatggacctatcagtcagtgcccatagtctgtaaatatcattctcccatgaaaggaactagggcttccaggaaaaatagctgatccagggctggggcagaaaaacacaagaggagcccaaagcttcttgtggtgtcagaaagtaaggagctgctcaaaaaatggtggagatgtgtctaaaggtcacagaagccaactagaaggagctcccaatggccaattttgggacaatatgagcaacataataaataatgatagtagtggattccaacccataaatactcatgagtccatgctgatataaataaataactgaacaaataaataaataaggaagaggctaggcatggtggctcacgcctgtaatcccagcactttgggaggccaaagtggggggatcacttgaggccaggaattagagaccagcctggctaacatgacaaaaccccgtctctactaaaaatacaaaaattagctgggtgtggtggtgtctgcctgtagtcccagctactcaggaggctgaggtgggaggatcgcttgagcccagaaggtggaggcggcagtgagccaagatcacaccactgcactccagcctaggcaacagagcaagactctatctcaaaaaaaaaaaaaaaaaaaaagaaaaagaaaaaggaataactctttcttatggcagaattccgattaaataaatgtagaaggaacaatggaagtagaaaatcactatttggccaacaccacagtaataattctttataggaaacaatcatccatagattctaaaagttaatattaaaagtatgatgatgccataactggtgaataacaagaaaaaaaaaagtatgatgagaagaaacaggctatttacatatttccaaagtgtctctccacaagatacttattaattacaataagatgaatagtaactttacagtagagaaacctggcagacaccacctgaaccaagtgcttaaagtgaacctcatcagtaatgagagatatcgacatcctggggctcttgctgggatgtccagagaaggatacatcacttctgaagtattcttgcccaaaatgtgtagccggaaatatcagacaaacccatattcagggggcattctacaaaacaactggctagaactcttcaaaagtgtcaaggtcctgaaagagagggaaagactgagaaactatcccaggttggaggagacctaggagatctgacattttattcagtgggatcccagattggagtctggagcagaaaaaggacatgagtgggatgattagcaagatttgaacatttgtagattagttaatattatggtatcagtgctaatctcctggttttgataattgtattatggttacataagatattgtttgaaaacaattggatgaaggctgtactggaactctatttttacaatatttttcaaagtctgaaaaatgaaaagtaagaaaaagtaagaaatgcattagatttgtgaggacaaatgagatagtaagtgtgaagtgattagaacaatgcttgtgatataggagttcttaatgtgtctgatattataagtaattttataattaaataatattataattaatgaataatctgttattttaagtaatttatttcctaatgacctcatatattctcacttatttctatttcccttaaccctgtgaaaagcatattgagcatgtatgtgattaagagataaaataagattagactttattctgagatttattttggggatggaggagctattatttcctttagccactaagtagctcagactcaggcctgcactgcaaaactttgcttggctgggaaacaagatttgagcccggccgccacccactcgacgtggtttgtgatggcgccccctggtggcgcagggagctttccccagttcctcaccctcgtgctttaggagcgacttagaaactactcagtccatttattaaaccctttctaggacacgctgcggatcatttaatcttcacaagtgtgtgtgacaagtggtattttcttcattttaagatgataaaactgaaactcaaaaaagtgaggcgacttgtctagggttgcaaagtgtgtggcagagccaggatctaggtccccctgacttccaagctgagtgtaaaggtctaggtgagtctaaaagtgtggccatgcagagaagtattggtgtagagcagtggttgttgaccaagggtggttccccctccggggtcatttggcgatgtctagagatatttttggctgccataacaggggtttggatgagggagaggggaggctgctattggcatgtaggggagagaggccacgcggatgctgctgaacatctcacaatacacagaacagcccccaccgcaaggaactgttcagcccaaatgtcagtagagctgctatgaagccctggtttgatttagcaacctgaggatgcattcttgcagttagctaatgtttgctgagtactgagctggatagcgtgagggatatggaaacagtgcaccagtctgtgtcaccaagtagtttgcagcctagaaggacagggggtgggggcaggaaaggcacatgaaggccctcaatataaggcagcagatgataagtgcaagaagagagtgtccagcagggctaagccagcgctcaggagggagaccacatgtctggctgtgggaggaactgaaggaagctgtgggaaggtggttttgagctgggtgtgtgagcaaagttgaactggtggaaaaacacaatacctgttcagggaagggcaaacaggttagtttggttggagaaatagtatttttagtgagtagagggaggtacactagaaaggcaggttggggctacagctttgaatccaggcagaggactctagcctgggtgtctgtcatagtgatggaaaagtcttccctttcagaacagtggtctaggccctagggctatggggcttaacagcttccagagcactctctctacaaaggaggggatgttggaaattggggtggagaagggagaatgcctcctgattttaggaccaagttgatgctgagtatgtaacatagccatttcacctcaaagtggcctttggggagatggtgctcacaagcggaaatatacatggggatcaggtcttttctgcgtggttgctctgtgcagggctgggccactttatagtgaaagctggagcagatttggaacccctaagctaaagtcggcttcccaaaatgtgagctgttacagcagggcttgctatggataaagcttcaaatatggacactacctggtgacaggctttttctagtttattacgttaccagtaaatagcattaagacatgttggtggcattccagtgcactgtaaagaatagaagcaaggacttcctgatcttctataaaggtaccattgccttcaacactctcccaccatcatcattaagtttagccatgagaattatgttactcttttggaaaagtgttgggggagaaggcatgggagcaaatctttgttgagctagtatatacatacatacgtacgtgtgtgtgagggggatcagctacaattgcagatatcttcttttcttttctttccttttttttttttttttttttttgagatggagtctcactctgtcacccaggctggagtacagtggtgccgtctcggctcactgcagcctccacctcctgggttccagcaattctctggcctcagcctcctgagtagctgggactacaggtgcgtgccaccaggtctggctaattttttgtatttttagtagagatggagtttcaccgtgttagccaggatggtctcgatctcctgaccttgtaatccgccctgccttggcctcccaaagtgctgggattacaggagtgagccaccgcgcccggccagttgcagatattttcacatacaatatctcgtttaactctctcaacattgtttgggtgtaagtacagtttgctgtttttttgtaaaggaggaaactggcattgagaaaggctcacttgccccatcccccatagctaagagaagctgcattttgatgtgtctgtggcctgttttgccacatttctccccccgttttccccttcatagacagtcttgtttacctggattcaggctgctagagaccatggacatcagcattagtggcagcaacaggaggagggaagagattagaactttcatcgcaactgtcggtgcagctgtaagttgcttgaagaatataatggaaggttccctgctggaggctcctgatccctggggatgactcaggtcaggatactcagcctggtggtctatgctttagtcccaggccagcgttcccatttgagggcgagaacaggtgaggtgacgctgtcttgctgttacgtaacagattagaccatgtgctttatgggaatctgggaggtgaaactggtcaaacaaaagaaattcagcattcttaagaacataagaaggtgactgataacttggcagctgtgccagttctctcctgtactctttcccgcctcctcacaccccaatgcctcatgatttcttcctcaaatctttttttcttgcttggatttccttatacctttcaatgaccctctctatctgaatatttggcaggaaagtggatactaagtgttggtagaagagactttgacaaggtctgtttcccctctgtgctcctgctcccatccttggcaaaatatcggcaatagtagtgttgttgcctgggaagttgccctgtcctctctctgttcacaattccctccaattctgcagccacataagatggcagcagagcaggatccgggacaagaggcagctcccctgccgagaacaccgcccctggagcagtgggtgacaccaggcctccttgtgtgtccatcgggaaggtggccatggcttagttgttctggtctaaaggggagggaactgggttgggggaagagacccccagagctttaggtctcagagggtttgagaaacaggagccacaggagggaaggagccctgaagtgtgtttgcccagctgctggggcgcctggctccagcccttgtttggaaatggccccgggcaaaagaagaaaggtaataatacttgaagtaaacattaggggcatagaatatcagcactcactaaacttgacatttatttgagactttaggaaatgtgctcaaagggagaggagaggctgggcttgaatgctgggtgatattcatgggggctgaagggaaggctaacaagggagccctttttttggaagcctccaggcaggagtgagagcagggggtgtgactttatttccctgagagaaggaaagaggaaaggcatgagtcaaagccctttggttttgtttgaccattcttttttctccacgttttcaaattatctcggcctgttgacttgtcacagagttgattgtggactttgctactgcagtgtttataaagcactgcaggggccagggactgctatgactgagcctgtgtccaagttgaaggctcagggtgggcctaagcttgttctgatgcaaatcactgatgtggcttctttctggaaaattctaaaaccagggagatgacatccatttcataaagcctagagatatgggtgcagtcatctctcaaagtggcaggagtgcagggggactgagagggacttggttgggtggaacttgagctggagttgggggaggatttgggttggtggagggcagagaggagggccgtgcagagcaggggcgtgttgtaggagaggtgcctcctggagctcattggatggggattttagaggacaggagctgttcgtgttcatttttgtattgcttgaacttacacagggtctggcactttgggagtattctataaatgactgttgaatggaatgattgttttgtagcccattaactgggcctgatgtattagaaagtgtgcgaaaatgtagcccattagcagaaagaaaatcttactgaaaaaccatcccatgtacaaatggagcctggtgcggccactttacttatgctgctgagttctgcatcagtccacacccaggccaccgcaggggccgggagctcctcctcagacctacctcccgtgcctcagtctctttacccctctgttcttccaggtcctgctccctctggtttcccctccatgcacttggggtgggtgttgcatcctgtgtcccattggagggggcttccggtctgttaggtctattaatataaaacacccccaagacaaatggacttttttcttgttaacatcacaacttcttatgatgcatctcaagaacattatttgtgtcaagagtctctctgatgtacagaggccctccattcctcaggaggaggtaaggggaatttgggagaaaacaccgccctgcctgggttacttatttccctattctacagtgtacttggtagacattcaaaaatatttgttgactttgtccatgatccacatggctctcatatagtcatttattcacacatacattcagtgagactttgagcgcctagtgtgtgcctggtatttactagatggtggatgctgagatcaggtgtgctgctgtctctgaggagctctcactatacagtggcacctagggtgaccgaatccacctgccccactttacagacatggaaattaaagtgcagggaagttataggattagttcaacaacacagtcagtagcctcaaagttacaggagtaaatcaagttttctgacttgctggattttctattagtgtgcagctacctggctgctgcaggtgtagacgtggtgagctccgataggagagaggacgttcagagtgaaatgggagccctgagcaccctggattaaccgggaggacataccgggtccagctgtgaccgcacaaaggaccatcagggatatttgtattctctttttcactttgagcttgaaatgaagaaaactgaccccaggaaaccaagagtggaagatttttcacaggggattagtgagatgcgtcaaaaagcctgtgttggatgggtgcctgtaatcccagcactttgggaagctgaggtgggaggatggcttgggtccaggagtttgagaccagtgtgggcaacatggtgagaccctgtctctataaaaagcttttttgtttcttgttttaaaaagaaaacccttttctgatgtctgtcacggtgtttctcactgaatggtaatggtctgactttgagtgggtttcatccatagcctggagctctgtgaggcagggaccaggtgtgattcacctttgtctctccagtgacagtacacagcaggatccgataaatatttcttacaaaataaaactgaataaaaagtagacatctgcacaggtgtgggatgactaagcagcagcaggagcaggaaaaatcagtccccccagatcagctgatacagcgttcagcttctagataggggtgaggtgccaggacggggatggggttcctgtggctctgctgctctggggaacacccctaggattcagagtgtaggctgtggttgctgcacttcacttgcccgtgggaaagtgagcagtgggtgtggggcttcaggtgaccctacgtgggaaacggccgagggaagatggggtaggtggcacatagaggttgtttttttatttttttatttttatttttgagacgaagttttgttcttattgcccaggctggagtgcaatggtacaatcttggctcaccgcaacctctgcttcccaggttcaagcaattctccttgcctcagcctcccaagtagctatgattacaggcatgcgccaccatgcctggctatttttttttgtatttttagtagagacaggatttctccatgttggtcaggctgatctcgatctcctgacctcaggtgatccacccaccttggcctcccaaagtgctgggattacaggcatgagccactgtgcccggccaaggatgtttaccaatatttgaaggtcggttgtataaaaaagtgttagacttggctgggtgcattggctcatgcctgtaatctcaacactttgggaggctgaggcaggcagatcacctgaggtcgggagtttgagaccaacctggccaacatggcaaaaccctgtctctactaaaaatacaaaaattagccgggcgcagtggcgggcacctgtaatcgcagctattcaggaggctgaggcaggaaaattgcttgaacccaggagggggaggttgcagtgagccaagattgtgccactgcactccatcctgggtgacagagccagactccatctcaaaaaaaaaaaaaaaaaaaaggaaaagaaaaaatgttagtgtcacatgcatccatgtgaagagaccaccaaacaggctttgtgtgagcaataaagcttttaatcacctggtgcaggcaggctgagtccaaaaagagagtcagtgaagggagttagggatggggcagttttataggactagggtaagcagtggaaagttacagttaaagggggtttttctcttgcgggcatggtggggagatcataagactcattgtccagaagaagaatgtcacgaggttgatcagtagatcaattgggacagggcaggatcaagtcatgacagaatgtcataaggttggtcaatcggttaagataggagttggctgtttcccttcttttgtacttgtcggttgcctcaggccatctggatgtatacatgcaggcttgggttcagaggcctgacattcctgtcttcttatattaataagaaaaataaaacaaaatagtgttgaagtgttggggtggcgaaaaaattgtttttggggtggtatggagagataatgggccatgtttctcagggctgcttcgagcaggattaagggctgtgtggaccttaaagaaaattttataataggttacatggaataggagtttaggctgtggggagatcttggggcagaggatggtactatggggttgttaaaagtagcatttgtcatatagaatgattagtgatggtctgaatgtggttttgtgtgaattgagaaaccaaacggaagacacaaggcccgaataagaggagaaaaagaggtaccagaggactaagaattgggaggacccaggatgtccaattagagagtgcccaagggggttcagcataattacttgcttgttggcgagtttttgggctatatccttgagtttttttttatattgtcatatactaggccagattgatttaggtaaaagcaacactcttcatttaaaaatatagagagtcctcctttttcagcagtgagtaagtcaaggcctcggcggttttagaggacaactgcagctaaagagtcaaccttggcctgaaggactcatagagtttgtgatatgtctgtgatgctagcagagaagtcattagagaggctctggaaggtcgtgacagaggctgaaatgcctgctattccagttctgagcgcaatagcggaggcagaaagtcctaaaccgacaagtaagggaattagtggaataacctttttttttgtcatgtcggtgtcatgagaggaacaggaagcttttcagtcccattcgcaaattgaattttgggagtaaggtaaactagtgtgcatgtgcctgtccaattagcaggtagacacatgtaggcagaggatccacagaggaagaagagaccttgtgcaaggcaaaactggaaatgcaaagtaaaaagatgagaaggaatactaaaagaggtgtcttgcactcagactcctagggatccagctagggcggcagccatcagaggttgtaatggggactgatggggtaactgcatagagggggaggttcgattttcatggtgtatgagaaaacgttgagtgtctacgagcaacctttcactgttatttacagggctgggtataagcaaacaaaaagagggcctgggaggagagtctgacgagcaaggggaaggtagtcaaggatggagtgaaatacagggtaagtgtcttcctaggaaataataactgctaatgtttttaagtttgccagtattgatagagggcttttctgtaatatggagctgggaggccccaattgtttcagtgatatgtgtagttgggctttggagatgaagagtgaaggaacacggagaaggtgaaaggttacctaggggaattccagtgggtctttgccaagagatacataaaggagtggccacaggaatagtagtttgtgttgtgaggggtccaaatatggggggagtagaattaatataaggagaaagattttttaagtaagtgcggagaagggcggcagcttgctgatgtgaaatgtctggggaggtcttgctggacctgtctagaaagtaaagaatttctttaggagggttaaggtgagggctgttaaaggaagttcggaggtgtagggagacaggagatgttgcttagtctgtatgtaaggcggggacagctgtgtaggcacaggaagaaagggaaatgcaaagccagcaattgttctctaaggagggatcagagacggctaggagagagtgaatgagactgatagtgtggtggagatagctggggagaggtagagggtggcataagaatgggaatgagaataagagtgagtataaaagtaaagaatagaacttcatcagggtggaagtattggagggtgccctgccagcaaagatcatctatccactctaagagggagttaagagtggcagtttggggatagcaccaggagatatccactgtgatggtttggaggaacagtgtaaactggcagtgtaaacaagagcagggcatttatgagtagttgagaacggtgaataagagtatgactagacagaagatagtagggatgacaagttttttggggtgcagtccaagtagtgggggtgactgcataaagccctgttgcaaaaagtagggtaaggatgaacagacctagtagaatgaagggacgtattaggctcatgagggttattactgttcttcagaaatacaagtgagtttaagggaagtaggggagagtacttgcgacttccaggaggaagaggagagattaggctggctgtttgatggacacagctttattctggaatggtgaacccaatggggaggatcctgcaggcggacagcagttggggtgctagagatgactaagtagggtccagtccattgaggttgtagagtttgaggggtcagattcttaacaagaacgggttgtccagctagggtgtcttcatatggctgggaatctggagtaggcaagagaagattagcagcctggggaatttcctgtctagcctgctggaggcctggaagatagttgcctagagggccggtgtctgggacaaggttggggccgagcaagaaagtgtgtccatgtaaaagttcaaatggactgtaccctgtagcatctcgaggacaggctctaattctgagaagggcaagaggtaaaagtactgtccagtcctttttaagttggagactgagcttggtgaggtatgtctttaaaagaccattagtccgttctacctttcctgaagattgagggcggtaaggggtatgaagtttgacttatttcagcctacagagagtaggatgagaattggtgagtgtgtatcagacacattttggctcaggatggaaaagaactgtcacagtaaagtaagtttccttgggaaattacaagtttactggtggagttcaggcctgagctgggtgtctgaaaatacctgttagagtgatttctaaggttacaagggcagagcttggcttgaaactaggtttcccactgataccacatattaggtattatacaaactgtcttttgcaatgagacacggccctatgatgcaggctgagctctctgacagttacttcctgtctttgtgggcgattgtgattttatctcctttgtgacctggactttacctcctaccctttgctcttgccagccctcccacttcctttactggtgacaaggtttaagtgcatttactgatgatggtcacaaggtggcagcactgcctcactggtgtttcctaagacctctgcttggacgtgggccagtctaaggtgctgttaggattaagggcatgaatgaggctaaaggtaaactttattttcctttttttatcctgtgaagtaacagaatttgaggtgagtgtgaagtaattgcatttgagaactggaagtgccatgtgtggtggctcatgcctgtaatcccaacactttgggaggctgaagcaggaggatggtttgagcccaggagttccagaccagcctgggcaacatggtgagacctcatctctacaaaaaataaaaaaattagccgggcacggtgacacatgcctgtggtcccagctacttgagagcctgaggcaggaggattcccttgaacccaggaggtccaggctgcattaagctatgatcctgtcactgcgttccatccagcctgggtgacagaatgagactctgtctcaaaaaactccaaaaatgaatacaaaattaaaaagtctggtagaaatgcttcacaaactttaatgtgctcacagatcacccaaagatcttgtttaaatgcagattctgattcttctggtggggcctgagagtctgcatttcttttttttatgattggcattttcacaagattctgcatttctaaggagcatttggacgatgtcattgctgctggttggtggagcacactttgagtagcaaggcttgagtatcatttagagattaattctcactgcatctgatttatggatggggagagactgaggtgtggagatggaatagagcttgccctccatagccatgccctcaccgcatgactttttgcgtttaaacccagggcttcagcctctttgtccagtccttgcctcatgcatcacatggccccttcactgttgttggtggcatctctttagcttaggaactcagaaccccatttttatcacccactctgggcttggctcaacatgtcactttgactggttttccccttactcaaaaccttcactgactcttctgtaattcacaagatcaagttcgaatgtctgtgtccagtgttcatgcctctataacatatgtatgatccccctttagcaagcttacctaacttccctggtttttgtttttgtttttgtttttgagacagagtcttgctctgttgcccaggctggagtgcagtggcaccatctcggctcactgcaagctccgcctctcggattcacgccattctcctgcctcagcctccctagtagctgggactacaggtgcctgccaccatgcctggctaattttttgtatttttagtagagacggggtttcaccgtgttagcgagggtggtgatggtctcgatctcctgatctcatgatctgtctgcctcagcctcaaaagtgctgggattacaggcgtgagcccaccgcgcctggccacttccctgtttttaaaccatctctttctgctctagctctccctgttccttcctgttccctacacatactctgttctggtctctctcagtggtagtggtggtggtatgggctctggtgttagactcactgagtttctaatccaacatccaccaacaaccttggcaagttacttcacctttttgaggatcagcatcctcctgtgaaataaccccacatggtggttgagaggagtaaataaaaaatcatctgtacctcataaatatatatacctactatgtacccccaaatgtaaaaattaaaaaaaaagtaaaacgacatctgcaaacccgctctcattcctgagaccctcttcaaagctagcatctacagcagtgcctgccacctggtttccttggcgtgtgtttctccttgtctctgctttcctaaggttgaacccttcaggacctcacctgaatcccgtctgttccatgaaacctttcccagccattcctgacccagttgatccctcgcttctataaattattttacctatgtatgggcatttaattacatgccagccctctcagtgagaccccatagggaggctggaagggtattggatgtgtgcgaattgaaggttaattgaatgaatacttttcttactacccactgagtgttagagctgccgtctctttttttcagctagtcccagcggcagttcctcctgcaccagctgcaccagaccctggcaggcatgtgaataccttagggattgctcttgtcagggtccttcctgcctctgggttttggttaaattggtgtttccttttgcacgatatcagtggtccctctaagggagagattgatgatatctctttatggaaatgccaagataataactgaggaagttgaactcaatatcttattgcttaaacagcctggttacaggagatgtgtacacactttcttgtttcgttaaaattacaacagtctttactctcttacttcagaagagactggggacaaaagaccaagtgggagtgtgggcaacatagggagaccccatctctacaaaaaaaaaattagctgggtgtggtggtgtgtgcctgtagtcccagctactttggaggttgaggtgtgaggatcgtttgaacccaggagctcaaagctgcagtgaactatgatcacgctgttgcactctggcctgggtgatagaccaagaaaaaaaaaaaaaaacaagtggggaggacagggtggtttaggggagttaatgtacctctaacctggattctctgaattgttctttcaatcatgtctggaagtgtacatctttgtatgtgtggtcatatatttatatcacatcactcataattccctgcctgtcagtggcaattaggagatcatgtcagtcaggcttaggatattaaaattatgtagtatgtgctttcactggagcaaaggtttctctgaagtctggagagaaaatggaccagtagggctggaccctttacttggggtcctgccttctctttttattggacagcagcctactcagccatcactttcccaatcaggggcttttttttttttttttttgagatggagtctcgctctgtcgcccaggctggagtgcaatggcacgatctcggctcactgcaagctccacctcccgggttcatgccattcttctgcctcagcctcctgagtagttgggactacaggcgcccgccaccatgcctggctaattttttgtatttttagtagagacggggtttcacggtgttagccaggatggtcttgatctcctgagctcatgatccacccacctcagcctcccaaagtgctgggattacaggcatgaaccaccgcgcccggccaatcaggggctttttaaccttcccattttcctataaaggatccatgccaatgttcagatatatttattgtgcctggaactggatgttcttttaaaaagtgaatcccagggatggcttcctagcagatttccaggattctaatcttcactgtctaaactgtgggtttccaaccttgaatactgattagagtcgcttgtagggcatttaaaacctaccaatgcttgtgccttcccccaagagagtgtgatttgattgatgcatgatgtggcccacgcactggttgtttatgaatgcttccaaggaaaatggtcattttacagtgggggaactgtagcccagtgctcaaagttaacatctccagtaatcagagatactgacatcttagggcatcctaatatgatggatggagaaggcgcagcatcacctctgtagtattcttgcccaatgtatataactttagtttcatcatgagaaacaactaggaaagcccaaaccgagggtcattatacaaaataactcaccaatactcttcgaaaatgttaaggtcatgaaggcaagagaaattctgaggaactgtcccagattaaaggaaactgggaggacagagcaatgagatgcaatgtctgatcctagattggatcctggtccagaaaaagaacattagtgggaagataaaggggatttgaataaggtctacagattcattcattgtacagtatcagtgatcatttattgattttgatgattatactgtggttatctaaaatgttaatatttggggaggctgagtgaaaagtatatgaagaccctgactatttgtagaagttttttgaaagtctgaaattatttcagatgaaactaaagaaaggaaaagaaagcttccaggtaattctactgagttgccaaagctgaaaaccacttctctaagttatcttgcttaataatactgtcaagagtaatcttcctggaaataccatattgttatgtttgtgaccttttcaaagctttccagtgattgctgtcatctaggatgaagttcctgctccttaggctaccatttaaagcccccatagcatggcctcaatctactccgttgatctacgtggaaggacttaacctacattttactttctcatgcctgagcttattctaattcttttactccttcctatataatacccttgccttcctgttcagcctcctgagctgttctttgtgctatggcccatttcagaccctgtctcttcattgaagcctgtatagttattcctgttagaagcaatcatccttcctttctttgaattctggtaggtaccgtgatgtggagtgaaccacgagctttagattcagaaatatgtgagtttgaatcctttgacagttccacctttaaccagttctgagataagggacaagtttatcaacatcttggaatagaggggtaatagagtacctgcatcaaagggtcattgtgaccattagatcagatgcaaacataaaggtcctcagcacagcatatagcagattctttcctcagcactttaatagctcagtggttcccagaaagtttgtgggtggtgtgaaggctcttatcaaaatttcctaaagagccttttaaaaatatttgcacctggtcatcactaagatgacagatgctctttaatggaactgaatgcttgggactttaagaaatgcaactgagatttttttttttcccccttggaacacaactgagtaaataagtgacctaagggcagaggaatgtaacccaaaagagggagaaggaggaactgggtttttaagtaggaaaaagctgtgatgccttccacacccactctgttgctgtcagtgagacagcagtgaggaagtaccactccctagtacaactccttaaaccatgagtcctgaacagcccttcactaatccattccctgtccagatgatgtgtacctggatgagtcagatccccatgagtcaatcattcttctccgtcttcagctcctccatcctcaccactcagtgctatgtgctatggtctggccccacttcccaggccattagtattggcctaagaaagcaagactgggaggggcaactgagaaggaagtcagaggccactaggcatggaaagaggcaggtggggctgtcattgctcaaaggccacacactctgggtgtgttttatgactgttcctggatttgaaatcttttcccctttgtgatcattccagagactcaccctcctcctgcttccttctcatcacactatctgttcctagtgcatcccttttacggccagagaatggctgtacaaatagttaacaattcagtaaaagttacagctgagcacggtggctcacacctgtaattccatcacttgggaggatgaggagggcggatcacgaggtcaggagttgaagaccagcctgaccaacatggtgaaaccccatctctactaaaaatacaaaaattagctgggtgtggtggcacgcacctgtaagcccagctactcaggaggctgaggcaggagaattgcttgaacctgggaggcggaggttgcagtgagccaagactgtgccactgcactccagcttgggcgacagagcgagactccatctcaaaaaaaaaaaaaaattactttttgggagaactgggaacctggccttcctttttgccaaaagagattgaggtccataaaagccagcttttattccgggctgtgcagttgtgagtgtggtgttagggaacaggtacataagtgaagggtaagacagaaaacaaaatgctggctgtttgtcaaatcctgagagtagaggggacaaaaatcattctgaaaggtggatgtcattcaggacaccttggaaatcttagggtgtcctcgcccagatggggaggaggatgaggttaaattatggagttgagtgacacttggtacattactaaacttctctgcttcagtttttttttttttttttttttttttgagacggagtctcactgtgtcgcccaggctggagtgcagtggcatgatcttggctcactgcgcgctccgcctcccaggttcatgccattctcctgcctcagcctccggagtagctgggactacaggcgcccgccaccactcccggctaatttttttttgtatttttagtagagatggggtttcaccgtgttggccagcatggttttgatctccttacctcgtgatccgcctgcctcggcctcccaaagtgctgggattacaggcgtgagccaccatgcctggcccctgcctctgtttttttaatctgtaaaaatggggatggtgacactcaggattctttgagaggactggagctacatggaaaccccttgggatagtgcctggcggatagtgagtgctgcatcagtgtgagctattataattatgggaatagacaaaggtgtcacccggggcatccagagtgaggaggtattttccagtcagagtcctgggaggccagctggagatgaagctggtgaagggggaggcttaacctccaggagtggaaggattgggaaggagtaactcatgcataacattctgtgaaaatacctttacccaacagcaggaatacgcacagtgggtgtggcttctgtcacaattattgtccctggggtctaggaatgtgaaacccaagcctagaaacaggcttcaggggtgccttgcaaattagcattcatcttgccaaaggaaaatgttcatcttgttaaaagaaagcatttacgtgctaaaagaatcccttcttgtggcccaggtcattatttttgtcttggtactatccttttttttttttttttttttttttttttgagaaggagtcttgctcttttgcccaggctggagtgcagtggtggatctcagctcactgcaagttccacctcccgggttgacaccattctcctgcctcagcctcccaagtagctgggactacaggcgcccgccaccatgcctggctaattttttttgtacttttagtagagacggggtttcactgtgttagccaggatggtctcgatctcctgacctcgtgatctgcccacctcggcctcccaaagtgctgggattacaggcatgagccaccgcgcccggcctgtactatccttatttacaagatgtaaagagaaagactgggctgggctcagtggatcacgcctgtaatcccagcagtttgggaggccaagcgggggcggattgcctgaggtcaggagttcgagaccagcctggccaatatggcgaaactccatctctactaaaaaatacaaaaattagctgggtgtggtggtgtgtgcctgtaattccagctactcaggaggctgaggcaggaaaatcacttgaacccaggaggcggaggttgcagtgagccgagatcgtgccattgcactgcagcctgggtgacaagaacgaaactctgtctcaaaaaagagactgaagaagagtgaaataaggatatatatgcattagcagggcagaattgggactggtatgtgtacgttaagaggaagcatgtaaaaattgtatgtgaacataaaaaggacttcttgttttaaacagacctctccatataaataatgtggactgtcttgagtagatagcagactccatcacaagaacattccagcagaatcacaagagaatggatagtgtggccgctttctaaatggtagtttagagtgagcaaatcactgaaaagaaaggagaccaagaagatgggtgagggtgagagagatgggatggtgaaaggaaaagactgaaataaatgtttaccgagggctcaccaggtaccaagctgtgtgtctaatgccttacacatgtttttttttttttttttttttttaagatggagtcttgctctgttgcccaggctggagtgcagtgacgtgatcttggctcactgcaacctccacctccctgattcaagggattctcctgcctcagcctcctgagtagctgggattacaggcgtgcaccaccacacccaactaatttttgtgtttttagtagagacggggtttcaccatgttggtcaggctgatctcgaactcctgagctcgtgatccacctgccttggactcccaaagtgctgggattacaggcgtgaaccactgcgcctgaacaatgccttacacatcttaatttactcttttattgtcatcctctgatggagtaagagtcacctttgtgctgcaaatgagaagaagctgagggaggcgaggtgagtggtcagcatcatccagccagttcatagcagagctagtgtgtttcacctcaaagtttgtgctcttgcctatgattcagacagaaaagtgagacacagcaggaaggcaaggcaaatttttgttgtgggtgaagtttataaaaggtacctgtattaggcagaataatggcctcctgaaaatatccacatcctaatccctgggacctgtgcattttactttatttggcagaaagactttgcagataagatgaagttaagaatcttgagatgggggaattatcctggattatctgagtgggcacattataatcagaaggatccttataggtgaaagagggaggcaggagagtcagggtgaaaatgatgtagcatgaggaagactccactggccactgctggctttgaagatggaagggggccataagcaaaggaatataggtggcatcgagaagctgggtcgggcaaagaagaggatccattccttaaacctccagaaggaaacctccagaaggaacaccgccaatgccttgattttagcccagagaaatctattttggacttttgacctccagaactataagaactgggaaaaatgtatgtagtttttacattccaggaggttacagtctgctacatagtgaaaagggactggaaaaaataggccaaaatattaaacaacgattaggtctagattatgggtggaaaatagaatacaagtgatagctattttttctttcatactttatgtcttaattttcaaaggtaagaaattaaaggtaattactgtcaggcctctgagcccaagctaagtcatcatatctccagtgatctgcatgtatacatccagctggcccgaagcaactgaagaaccacaaaagtaaaaagagccagttcctgccttaactgatggcattctaccattgtgatttgtttctgccccactctaactgatcaattgaccttgtgacattctttttcttggacagtgagtctcatgatctctccaccgtgcactttgtgacctccaccactgcccacaagagaaaaccacctttaactgtaattttccactacctacccaaatcctgtaaaactgtccccccaattctccctttgctgactctcttttcagactcagcccacttgcacccaagtgcctgtatagtagactgtcttcacatggacgcgagtaacaattacattgcgatgttataaatagaagtatttcaatgtacctgttaaatcctctggacgatcactgagaaggcatatctttgagtgtaaggatgaatttgccaaggacaggagtgacgttataggcacagttttttaaaggcaggaagagagggccttatccttcaacctaaatggtccatcatttccatggatcaaactcaaaggaatgactagtcatcaaggaatgtgttcagtgacatcttatggggtaaactgagacattccaggagcctggaatcaatgtgaagtagtttcagacttggtggcaggggagaatgtgctcctaaaatctgttgtttagggctcagccttttctgcttttttcttcctattatttcttaacaatgctgaggtgggcagggccccagtcccggaacaggtcacctgtacttaataggaaggtttgtttcctttgttgaaaggggtggatatatagccctgagtttgttttttttttgtttttctttactagcaattagggaaacatagagtggctgctttctctactaacagcctcataatggagccatctaaatctcttactgattcctctaacctccagggagccacacctttacccagtcctcctagatcctgggggaatcagaggaccttgtgtaagcactatgtgaggaaacaagaaaacctaggggtaagaactcttgtaattgcctcttttttttttctttcttttaaaatattttaaacttttattttaggttcagggctccatgtacaggttttttgtttttgttttttgagacagagtctcgctctgtcgcccaggctggagtgtagtggcgcgatctctgctcactgcaacctccatctcctgagttcaagcagttctcctgcctcagcctcctgagtagctgggattacaggcgccagccaccacttccagctaatttttatatttttattagagacggggtttcaccacgttggccaggctggtctggaactcctgacctcaggcaatccgcagcctcccaaaatgctggaattacaggcgtgagttaccgtgcctggcctgcaggtttgttatacaggtaaacttgtgactcaggggtttcgtatacagactattttgtcactcgggtacttagtacccaacagtttttttttttttttttctgatcctctccctcctcccaccctccaccctcaagtaggccccagtgtctgttgttcccctctttctgtccatgtgttctcatttagcttccacttataagtgagaagacacagtatttggttttctgttcctgtattagtttgctaatctattttattaaagtatgtttccctttcacccctcctccctccccaccctaatattttagggctaagccctcatcactggacacaaagaaactggtttcttagatgctgctatgctttggttccacccaccaagacaatgggcctatttttttctataatcaaaggccctgtgtttggcccgtacagttctacgttaaactggtgccaaagctcacgccttcctgttccgttccttccaggtcatctcagaatctgcaggcttgtggggcagggtagggagtcctgagtggtgaccacagaaaggggaaagctgtgggaatccaagacagttgttcttgagagagtcttctaggcctgttggcagaagaagcagaattgtgggccaggacctgggtcctggtgttggtgactgagctctgactttgaatgagtagatttgcctatctaggccttagctgtgcctgctgcaaaatgagatttgagatgaactcaagcccttacagcttgactgctctagccatgcattttcttttctcttcctcattgaaatctatatcattccttcagggcccaaggacccatgctcagaagaaatcaatttggctaatgtccttatgagaggggaccaaccctcaggctttatgtgctctttggccttttatgcaagagtggtgagggtggatatttttgttctggtcttcttttggtgctctttgatagcaggaagggcagagtcctgacagactgtgaaagtcttgaccaccagcttaaggagtctggactcttgtgagtgtggaactaccagaggcttaaagtgggaagtgacctgtgtctcaggacacatactctaggagaagtgtggctgtgcagagtccacatgagagactcagatctgaagtgagaaatcagagggcatgaagaacaggggcataggcgtgagccatttgaggaagagttggaggtctttgtgagtgaccagaggggaggagatgggaaggaggggcctgaagatggctccgagctgtgtctagtttgggattttgggtggaccagatgtcattagccccaagataagggtggggctaggttgattaggggctgaaatgctaaacctagttttgaatgttagataagatgcctatcggccatccaggtggaactactgtgtggggagtgggaagaatacagctggcgctggagccagggagtggtagagggtgaagaggaaagagggagtgagctgggggggtctctgcctctgtagtaacttcacacctgctctcctgcgtcgagctcatggctgtgttctactctttccctctctgttctctgatcagagcaatttttcagggttttggctggatagatattattagcccaggggtcacatatttactaccaataggtcttttggaaaatggggactgtgaatcaatgaatggagaggtgaaaagaggagagtgaaggaaggacttttggagaaagataatagggaagaggaggcaggtgaaacacatgctataaaatgtgttagcattcattataaactataaaaagcacaatgcaaatgtacagttctgctgagaacactgtgaccatgggttggaagggggagaggtgagactaggagggtaaaggggaagaagtagcttagaaggatgaagccaaaagccaggctactagatctagaagtctccttggaaggctctctactgcttaaaaattacttggcctatccaatctctttggtgtaatgagttttttttttttttttttttttttttggagacagagttttgctcttgttgcccaggctggagtgcaatggcacaatcttgactcactgcaacctccacctatggggttcaagtgattcttctgcctcagcctctggaatagacgggattacaggcatgcgccaccacacccggctaattttgtatttttagtagagagggggttttgccatgttggccaggctggtcttgaactcccgacctcaggtgatccgcccgccttggcctcccaaagtgctgggattataggcatgagccactgtgcctggcctgggtgtaatgagtaatgggtcttatatgtttatatgacgatattaaatgctaatagccaacaaatattgtatgcttacaattagtacatctaacacagctagtgtaactaatattgtgtactaatagtacgatgagtggccaacaaatattgtgtgctcagtatataccaggcagtgtgctaaacactttaactagattacctcagttgatcctcacaacagcacatgcggcgggtacttttattggccccattttacagatgaggggagtgaggtatagtcatttgcccagggccttgcagcttgtatgctggagccagaatatgaagccaggccgcctgggggactatatagcatgtggtcttaatcactcagcagttcagggtagttcagtacattctgtacttttctgtttttttgtttttgttttttttgagatggagtcttgctctgtcacccaggctggagtgcagtggtgcaatctcggctcactgcagcctctgcctcccaggttcaagtgattctcctgcctcagcctcccgagtagctgggactacaggcacgcaccaccacgcccggctaatttttgtatttttagtagagacagggtttcactgtgttggccagggtggtcttgaactcctgacctcgtggtctgcccacctcagcctcccaaagtgctgggattacagacgtgagccaccgtgcctgaccttttctgtgtttttttttgtttgtttgttttcttttgtttccttttacctctgacgaagacatagataaaatgcagctcaggtacagaaagtgtcaactttcaggttgattcccagattgagagcaggaatgctgaggaaagcaacagggtaggacttctcatagagtggtccttggatcatctgtattgggatcttcgaggatgtttattaaaaactgagatctaggctgggcgtggtggctcacacctgtaatcccagcactttgggaggccgaggtgggcagatcacaaggtcaggagattgagaccatcctggctaacacggtgaaaacccgtctttactaaaaatacaaaaatcagccgggcatggcggcaggcgcctgtagtcctggctgatggggtggctgaggcaggagaatggcgtgaacccaggaggcggagcctgcagtgagccgagattgcaccactgcactccagcctgggcaacagagcgagactccatctcaaaaacaaacaaccgagatctaggccaggcgcgatggctcgtgtctgtaatcccagcactttgggaggccgaggcgggggatctcttgaggtcaggagttcaagacgagcctggccaacatggtgaaaccctgtctctactaaaaatataaaaattagctgagcatgggggtgtgcacctgtactctcagctactcaggaagatgaggtgggagaattgcttgaacccaggaggcagaggttgcagtgagccgagatcgcgccactgcactccagcctgggcaacagagtgagacggtctcaaaacaaaaacaacaacaaacaaaacaaaaaataccctgagatctatagttatcacttgggccaactgaaagaagaatttctcaaacattgatgtttgagacctactgatttaaggctgaatgtctggttctggaaggaaatggaatcttggcttcttcagtcaccacagtttgggtcttgttcctctgtaaaattaacaatgtaggccggcacggtggttcacgcctgtaatcccagcactttgggagtctgaggcgggtggatcacctgaggtcaggagtttgagaccagcctggccaacatggtggaaccccgtctctactaaaaatacaaaaattagccaggctttggtagcgcatgcctgtaatcccggctactagggaggctgaggcaggagaattgcttgaacctagtgggtagaggtagcagtgagccaagatcacgccactgcactccagcctgagcgacagagcgagactccatttcaaacaaacaaacaaacaaacaaaacccaaaacaataatgtggtccgtgctctctttctttctttgggctcttggaggggtggggtgggaggaccaagagtggataaaattgcacttgcctttataccagaggaggcactgtgaggcagcatctcttacatttacctttcatttatttttctcccccagatgggtttcacttctctctctgtcctgttggggaacttcccagctgaggacctccatgtggtttggtgctcggttgggcgatgagcattgggaggggagcagttgtagtgacttctctcgggcctgccatgctctgccatggaggtggagtgacatgaagtttagctgcttcacctcagtctgctcaagagtggggactgctgagagcagtgaatgggggacagtggaattgcagcctgggatgtgaaacggggatcctgttacctgcagctgtagtcttcacgtgtcctcatcttttgtgactcccctagggccctgagctgagcaagacagacaaacaggaggaagtattaatctttctgcttccatctcatccactagcaagtttggaaggccagtccagttatacccactgcctcgggtgaggacatcagagagttttatgcagctcagttttggggatgttcacacactctggcctcaggaagatccagaagtgagggaaaggctctgggctgggagtgaggaggccttgttctgtgtcagctaagctaccgacgttctttgttaccatgagaaagtcactcgctcactctggacgggagttttcttatctgtaagctgttggatttgagtgagatcatcttttgtgttctcaagttctgattctgtgattaacagtggtaggttgaggcaggtgtggcagagccccgaatgctgctttttctgtcacatgtgcctccctcccccaaaaggaacaagtagtgagttttatttgcatctcttcttgaatagctctgtgtttctaagggctgaagaggcccactgtgggtgtggtgaggagagtctggaggcaggagcttcctttggctctggggaaggaggcccagttggtagcttccctgccattgcacagacttcttatgttccagtaataacatgacttccctccctgttctgcctgcctctctaatattcagtttctagagtaggctatgattgttttgatagatttcccaactgtttcctgcctatgtgtctttgaagcaaatagcaggaaattcttttcatagccatcagggtctctgtttcatatttccccttttccatagaacctgacagatccagggcacagagagacacatgtgcatgttccagctcccagtattcatacagatatggtgaagggtaggtggagttagattcttacggtttggttagtattgtccggggagctcctgtaacacatgtgagattctgtgttctgtgataatgtcttgtatgtcactgctacttaagagtttaaggtgaagctttgtgagtgtattacatgtgtctggtgcatgcgtgtgggtcagaatgtggatcagtggctgctgatgtgctgatgctgagaggaagtgatttaggagctgggcttgctctctttatgtttctgctttttgtgcaatgtcctggtaacttgtcagaggctggataagatgttagaaattttcttaatccagtctgaaatctgccttgttttattcctgggtatgaatcatgtgaggggttgggaggtggaggatgaaattcccataccttctgaatagtccaaggtcagttctcagaaatcagatgttggttgtttagccatcacacccttagatttatgagttggacctagaggatttgatcgcttctgtgacagaggtatcatcctgttcccagaaaactggcgacacgttgacatgcaggaaattggtcagatttatggcttgtttctaaccaacatgtaggcgttctgccctttaaaaacaattaaatttcactgatgtttttcatgtatctaacaagggccagttgctgaattctcaaagataaataaaataagccgggcgtggtggctcacgcctgtaatcccagcactttgggaggccgaggcaggtggatcactaggtcaggagttcaagacaagcctggccaagatggtgaaaccccacttctactaaaaatacaaaaattagccggggtggtggcgggcacctgtaatcccagctacttgggaggctgaggcaggagaatcgcttgaacccaggaggcggaggttgcagtgagccgagatcgcgccactgcactccagcctgggcgacagagtgagactccatctcaaaaaaaaaaaaaaaaaaaaagataaataaaataggatctctttcctcaggaacaaacggtttgtctttttttgaacatggacttctggggctaattctcacagtacccaactgtctgtcttgcaagcctttgggagctctcagaaccagacaggctagctcagtcatgcagcagctgacacaggagagtggggtgtgagtccagccccttgccactttctgactctcccttttaggacacagtggccatgggaaggcaagacactgggctccttaagaaaggctgtggggggaatgtggtggaggtggcaactgcaattatccctcagcttgcccctcatctctccagatacaacagcatggcctcaagcacacccagaagtggagaatgagtgtatgttccctgggggaccagaaatggatttgttagttgttcttacaaactgtagtagtgagatggcagggcaatttgagccttgcggagtcatgagtcatccgtagggaactataattacttctctccattcagaccaggatgctaggcagtagttaaatggggcagggccaggcacggtggctcatggctttaatcccagcaatttgggaggctgaagtgggaggattgcttgaggccaagagtttgagactagcctggccaacttggtgaaaccttgtctctactaaaaatataaaaattaaggctgggcatggtggctcatgcctgtaatccctgtactttgggaggccgaggtgggtggatcacctgaggtcaggagtttgagaccagcctggccaacatggtgaaacccccatctctaccaaaaatacaaaaatttgctgggcgaggtggcacacgcctataatcccagctactcaggaggctgaggcaggagaattgcttgaacccgggaggaggaggttgcagggagctaaaatcttgccagtgtactccagcctgggtgacagagtgagactttgtctaaaaaaaaatatatatgtatatatatatatatttatacacacacacacacgcacacatgcacagatagatagacatagatatctatatatataggtatctatctatatataaaaattagctgggcatggtggtgcacacttgtaatcctagctactcgggaggctgaggcatgagaatcacttgaacccagcaggtggaggttgcagtgagctgagatcataccactgcactccagcctgggtaatagagtgagactccatctcaaaaaaagggagggaggggcatttgtggagaaagatgcacaagaaatgctcaggccaggcatggtggcacatgcctgtaatcccaatcctttgggaggccgaggtgggaggactccttgagcccaggaattcaagaccagtctgggcaacatagcgagaccttatctctaaaaaaaaaaaaaaaaaaaaatttaaaaatttagctgagtatggtgacacatgcctgtagtcccagctacttgagaggctgaggcaagatgatcactagagccttggtggtcgaggctgcagtgagtcatgattgccccacagcactccagcctgagtgacagagggcagagtctgtctcaaaataaaaaaataaaaaagacatactcagaccaactggtgccacatttttgtcggaggctcatacattaagctgctgtcccctccaccacacagaggcacaaaggcagtggcagctgggacttccttccctgttttctcccattcttctaattcttcatgatgcccttttgtgacttctttccccctttaatactgcttttgatatcatttcagcctgatgtcacttgtgcaaaatcactgggggtaggctgggtgaaaattttccaaaccacacattctttttttttttgggacagagtctcactctgttgcacaggctggagtaccatgtcacaatcacgactcactgcagccatgaccttttgggcttaagtgattttcctgcctcagcttccggagcagctggcgcatgcgaccacacttggctaattttttgtagagacagggtctcactttgttgcctacactggtctcaaactcctgggctcatgtgatcctcctgcatcagcctcccaaagtgctaggattatatatcagcttgagctgctgtactcagcccaaaccccacattctttttttatttttgttttttattttttgagacagggtcttgctgtatcacccaggctgaagtgcagtggtgtgaacatacctcactgcagtctcaacctcctgggctcaagcgatcctcccacctcagcctcctgggtagctgagaccacaggtgtgaggtgtgtgccaccacatgtggctaactttttaacttatttttgtagggacggggtcttgctatattgttcaggttagtctctagctcctgggctcaagtgatcctcctgcctcagcctcccatagtgctgggattataggcatgagccactgcgtctggcccaaaccccatgtttttttttttttttttgagacggattctctgtcgcctaggctgcagtgcgatggtgtgatcttggctcactgcaatctctgcctcttgggttcaagtgattctcctgcctcagcctccctagtagccaggattacaggtgcccaccaccgcacccagctaatttttgtttgtatttttagtagagacagggtttcaccatattggccaggatggtctcgaactcctgacctcagctgatccacccacttgggcctctcaaaatgctgggattataggtctgagccaccacgcctggccccaaaccccacattcttaatggcagctctgggccctacataatttcacttcttcagggtgaccctgggaacttaattctaacttgggtcctattgtagctctttaaccaccccaacagctctgtaagtatagttcagcttgagagaaagagacacagagagagaaacttcaagcactgggtgtttggtgccttgggagtcagacagactggacctggatttaaatccactttgttctctattatctgcgtgatcttggacaactgacttaagctctctagggctcaattgcgacatttgtaaaatgaagatgataccatgtaatagttataatagctactgtattgagcactttatatttattaatacagttaatccccatatatctctaggaattaggtactattgtagttgtcatttctcagataagaaaactgaggcatagagaggttaagcagcatgccaacagtaacacaattcttaagttgtggagctgggattctgaacatggaagcccaacctcagagcctgtgtccttaactactgcagtggactatagtccacagaatgttaacaaggattgaggtggggggaaaaaaacaaaaaagccccccaaaaacacaaagcatttaaagtaccaggtatagagcttggcaataagttattaaattacataactgatggcagtaaatggcagctgttgccgccagggtagaaaagcctgttttccaagctgtgtttccccatgggcacacggaggatgtggccctcagtcagggcaaggcaggagagagacgggtcttcccgctgtccagggtttgcaaggtgtcagggcttcttccactccgactctgttagacacagtttgttggcaaagtcttgtttctctaatcccaaagttgcctaacaggccccgaaaggaaaacacaggagcagggtggccataggaaagggctcccttccagtgagccagttgctcaagaatcacttttctcactgcttcagaggaatctggctttttgtatcctgctgtcttacccatttggtcagggctcctggataagctacctggggaacagagtggggcctctgcctaaattggcacaaggtgaagagtcaatgccaagaaacaaaggagaccctgcagggacctggggaaacccaaatctgggcttcaggggaagggagcatcaagcctgctctgattctttgtcatgtatactttggccctctgcctgggcttgtgaatgtcttggttagtcactgagcagttcgggtgcacctgtcccattcaagacaccaactgggttagaggcagcatggtttttggctaaatgtttttatggaagctgaggaacctgcatttcactatagctctgccactttttagttaagttgtgtgatcttgacagtttactcttttgtgagcctcacttttctcatttgagaaaattatgaagatcttttttgagacagagtctcattctgttaccaggctggagtgcagtggcttgatcacagctcactgtagcctcgtcttcctgggctcaagcaattttcccatctcagcctcccaagtagctgggactacagatgtgtgccaccatgcctggctaatttttaaatttcttgtggagatgaagtctctctatattgcccaggctcgtctgaaactgctgggctcaagcagtcctcccacctcagccacctaaagttctggaattataggcgtgagccaccgtgcctggctgaattatgaggatcaaatgacatcatgtacacaaaggccttagaacagcaacttacacattataggtgctcagtaaatgctcatagtcacaggttaggtgcagttgggagctgtggagaaatataaagtacaatctcttgcctttaaggaggttgcagtctagatggggtgagaggtaataagatagaagatcatgtaaatcacaatgttgggaatgcatgtaaaataatactggctggttgtgcgcagtggtattattgtagccaatgaggtttatccgaggtgcaattattgtgaatgggaaactttcgcaataacatcagccaacaagtgtcatggaccatgaaggctttgggagttcagagctatgagagctgccccatgggctaagccagggaaggctttctgaacaagtgagtgttgcaaacctgcaaaggttggagaggaaggtggagggacactccagaaaaagaacagaatgaggccaagtagcataagttcagaggataggaagaaaacagattggaaccaagggcttgtaggagacatgagagggaaatgagattgaataggtgggttgaggtcaggttgtaaagagctttgaatgccgtgctaaggagtttggaatttatctgaaggtttttgaggaggggaatgatgttcatattgtgaccttgatttggccatgtattcttttaatttctctggaccttagatcccttatctatacagtaagaagtttggatcatgtgattgtagaggagtttctctagctagagagtttatgattctatgatacaggaagactattttatttttgtctttatttatttatttatttttgagatggcgtcttgctctgttgcccaggctggagtgcagtggcacgatctcggggctcactgcaagctccgcctcccttgttcacgccattctcctgcctcagcctcctgagtagctgggactacaggtgcccgccaccatgcctggctaattttttttttttgtatttttagtagagacagggtttcaccgtgttagccaggatggtctcaatctcctgacctcgtgatccgcccccctcagcctcctaaagtgctgggattacaggcgtaagccaccgtgcccagccgaggacttcaatatttaaaggagaaagaacaggcaggaggaggaggaggaaagaaaaagaaaggggagggtaggcagtgaggcaaacagttacattcttgggaggctttgattagcactcagtgaattcgcattttacatgtgaaaagaaaggaatggaggggaagtcaattatgcatttatctagtgctcaatagatctacattttacataagataatgtaagactgtgaaattacagctatctgtttaggaacaaaaagaaggcagtttctgcatgactcagttcccaagcttaacttttccctttggcatagtgaatttgggatcccaagattttattttcctttcacaaactcaatacattgattaagtttaagacttcaccatgtgcctcacacatggaatccagtaaatgtttggtgctgtttattcactcattgaattccttaataagcatgtagtttcctgaatgcctgctagatactaagcactatattaggtactaagtatattaatggaaataaaaacatggtggcccttaaggagctcatagtcttttaaaggagacaagtcaaacagttacagaacagaatgacaagcatgggtcaggcacggtggctcatgcctgtaatcccagcactttgggaggctgaggcagttggatcacctgaggtcaggagtttgagactagcttggccaacatggagaaaccccatctctactaaaaatacaaaaattagccaggcatgatgatgggtgcctgtagtcccagctacttgggaggctgaggcaggagaattgcttgaactcgggaggcggaagttgcagtgagctgagatcgtgccattgtactccagcctgggcgacaagagcgagactctgtcgcaaaaaaaaaaaaaaaaaaaaaaaagaataacaagcgttatgattaaaggacaaatcaagtgttacaggagcataggggagggcttactaactcatcctgggatgagaatgctgagaacagagaaaccttttcttttcttctcttttctttctatttttaagagctaagttctgaaagaggagtagaaattgagaggagggccgtctagggagaaggaacaatacacgcaaagtctgtgatgtgagggagtgcaaagtcagtgatgtgttccgggaactgcaagtagctgagcctgttgtcacagagagtacacaggcacagtgattagaagtaatcagggaccagattacgaagagcctggtatgcttggtgaagaagtttagattttatcctcaaggtgatggagaactatacctagattttaggcagggtattgatgtaaccacccaatgggttcttcctgcctgctgtacaaataatgaccacagcattgcagtaaagaaagagtttatgcggtgggacgaaagagtttaattgacacaaggctggccacaccacatgggagatggagttgttattcaaatcaacctcatcttcagctcataggttagaggtttttatttttttcctattttattttattttattattattatactttaagttttagggtacatgtgcacaatgtgcaggtttgttacgtatgtatacgtgtgccatgttggtgtgctgcacccattaactcgtcatttagcattaggtatatctccaaatgctatccctcccccctccccccaggttagaggtttttcaaaggcagtttgggggaaggggttggagtgcttgcggctgattggtttgggtggagatgaaatcataggatcttgaagctgctctctttagcgagttgcttctggctagggccacaggagtggagttggcaggtccaggtggagctctgggtgtcagacatgcaaaaaacctgaaaagatatctcaaaaggccaatctacaacagtgatgttatgtgcaggacatatctggtgaccagtctacagcttagcagaattcaggttcctctcctccctctatcctgatggcctttcattagctttacaaaggtggttgagttttggggaaggtttcttatcatttaaactataaaccaaatgtctcccaaagttagtttagcctaagcataggaatgattaagggaaaggcaagatgggggagcatgggttagataagatctcttactgccatatttttttcactgttataatttttccaaaggcagtatcattgacattagcagacttgtgttttagggtgatctctttgactgtcaaagtggaggacagattgaatctatgagttaggggaagatgaagcccagaagcaggataagttgcgttagctgtgattgctgctttcttctctgggatgcccctttccatctttacagatcttgcctgtagtacttgccatagcaccaggcaaatagaaggcattttacatcatgtgttggttactccactgctgtggcttgtgctaacagtgactggggcactgatttgaaagtaaagtgagcaccctttttcctgtggtcacaaatcaggcaaaattgctttcttggttagaactgacgtggaagatacacacacacacacacacacacacacacacacaaatacacacacacatacaaacacacacatatattttttgaggcagtcactcaatcgcccaggttggagtgcagtggcatgatcttggctcactgcagtctccgcctcctgggttcaagcaagtcttctgccttagcctcctgagtagctgggattacaggcgtgcgccaccacgcccagctaatttttgtattttcatttgagatgaggtttcaccatgttggtcaggctggtcttgaactcctgacctcaaatgatccccctacctcagcctcccaaagtgctgagattacaggcgtgagccatcgtgcccagccagaagatatgtttggctcttctcaagatgtctccataggcattttccattttgtgaagagtctttgttccaaagttgacagtgggttcctttagggcaggaaacatatttttattcatttttgtagtccctggacttatcacaatacgtgatacatactaggcaatgatagatatttgtttcatgaatttgaaattcatgttttgtatttgaaatatgtttcatgaaatatgctgtaaatgttgattaggtgctcggattccccctcaaaagccttttaaatctagagcctaatggggtactgggcatatctaaggcctgagaaggagggaaactctaggaaatggcaggaattagcagaatggaagtaagttacttcccagaagtatttagcagttgaactgagacagttccagaaagattctgggccaaaggtttttagaaagacctactggggagattgggaagttctgaattccttttgctacctactgttatacaaatcgcttttgttcttcctcatatactttaaaatacatttggctggcacagtggctgatgcctgtaatcccaacactttggaaggccaaggtaggaagattgcttgaggccaggagtccaagagcagcctgggcaacacagcaagatctccattaaaaaattagccaggtgtggtggcatgcacctgttgtcccagctacttgggaggctgaggtgagaggatcacttgagcccagcaggtcaaggctgagtgagccatgattataccagggcactccagcctgggtgacagagtgagaccttgtttctggaaaaaaaaaaaaaaagaataaaattggcagggtgcggtggcccacacctataatcccagcatgttgggaggctaaagtgggaggatcacttgagcccaggagttctagagcaacctgagcaatgtagagagaccttgtcttttttttttttttttttcttttgagacagagtctcattctgtcactaggctggagtgcagttgtgcgatctcggctcactgcaacctccgcctcccgggttcaagcgattcttttgcctcagcctccccagtagctggaactacaggcatgcaccaccacacccagctaatttttgtatttttagtagagacagggtttcaccatgttggccaggatggtctcgatctcttgacctcgtgatctgcctgcctcggtctcccaaagtgttaggattacaggcgtgagccaccacgcctggctgagaccttgtctttacaaaaaataaacaaaattagctgggcatggtggtgcacacctatagttccagctacttgagaggctgaggtgagaagatcacttgtgagcccaggaggtcaaggcctcagtgagccaagatggtatcactgcactccagcctgggcaacagagtgagaccccatctaaataaaaataaataaataaataaataaataaataaataaataaataacagttaaactacatgacttgccatggtttcctgattctttgtctttttatgtttcctttcttcgttaggaatgttttttcctttatgccattgtcatcattcttcagtgccctgctgaaatgcttttcatgaaaccttatggaaaaaataatctctccctaccgaagtcatctcaatttttagacccccttgtggtacttaatgctctctacctagaattatatatgggttatcattcttacactagaaggaaggaatcatatgtaatttagctatgagtattccagagtgtctagcacaggtctttgtaaatgttgaatggacaatgtggctgagctgtattactaacttagtgttatgcttacttttacttgtcaacctagctggaccatgacgtgcccagggatttggtcagacattattctgggtgttttttttttttttcccccaagatggaaccttgctctgtcgcccaggctggagtgcaacggcgtgatctcggctcactgcaacctccacctcccaagttcaagcaattctcctgcctcagtctcctgagtagctgggattacaggctcatgccaccacacctggctaatttttgtatttttagtagagacggggtttctacatgttggccaggctggtcttgaactcctgacctcatgatccgcctaccttgtcctcccaaagtgctggattacaggcctgagccactgctcccggcctattctgggtatttctgtgaagatatttttgcatgagattaagatttaaattgatagattgaataaagtagattgctctccctaatatgggtgggcctcatccaatcagttgaaggcctgaatagaataaaaagatttatcctcccttgaggaaaggaattcctcctgcctgaccactttcaaactgggatattggcttcttcctgtctccagactcaaactgaatcatcacctcttgagccttgctggcctttggactgaaactatacaactggctctcttgggtctctagctttccagctcaccctgaagctcttgggacttgtcagcctccataattgtgtgagacaattctttataataaagctctttttacacacacacacacacacacatatcttgttggttctgcttctctggagaaccctactacacttgggttctaaatgttagaagtatcccagggaagggaaaagagtcctatctaccattcctggcacaggattaacatgaggcacactttaaaaatgatgcttacctttgatatcttttcatctcttgcaccctttttttgaactcttctccctcttctaagatttaaggtatataggactttgatgctacccttatccctctactttaatatctgatccaggcctatcttcttcctcatttatggcccaaatttccttttggcccaaatttcctttgcttttgagtcattttcccaatcctaccccattcccattaaagctcccaactcagtgtgttagatggaagctgggtggtaagggaaaagcagtttgtacaagtgattcatgtatagctgaaagctctgtaatcttctcagagtcatttgctaaatgaattggatgaaataccatgtagtttaataaagtgggatgaaaattttaggcagagtgggggtaaaatcttcgagtaactgcccaatgggagttactcaaccctacctggagtcagtcctagggttagcattcctgtgcgcttactgctttgacagattcttcccttttccatctttgaaaccagtttcaccaggggcggtggctcacgcctgtaatcctagcactttgggaggctgaggagggcggatcacctgtggtagggaattcgagaccagcctgaccaatatggagaaacctcgtctctactaaaaatatgaaattagctgggcgtggtggtacatacctgcaatcccagctactcaggaggctgaggcaggagaatcacttgaacccgggaggcagaggttgcggtgagtggagatcgcaccattgcactccagcctgggcaacaagagactcttgtctcaaaaaaaaaaaaaaaaaaagaaaaaaaaagaaaccacagtttctcccaaaacattaacaaacaagcactcccacagaagtagcaatggagattctactgctagcataggaagagagaaagaaggaaaccattagcagtctccactggatttttctaagttagcaactatttatagttttgaaagtcctattttagaagaatatgatttgtttaaaagatgatgagcaaatcagtagttttatattatatgtggtcataagcagagaaaagacctggttataggagagcagattttaatgcggtatggaggcattatgtttgaaatgttgataaatcaaatctgtcgtgaagctggtctggcttaaaatacttaggatctgtcttatcttcagctagctcttcccttccagattttgaaaccagcgcaattgtcccacaggactaatgtttacaggtttttttaataaacatagaaattgaccttccctagtcttagaactctaaacttgtatctgtctcatctgagttccttccttaggaaacctaccctcaggcaaggaactgaaacccatcagatcctcacacccagacaacgagataccagactcctcatccatcgtgactgcttccctacccctccctaatttctgttttcccaccttccctgctatataaactccccagtttcagtctgtcagagattgatctgagactttatctcctgttgaccttcactgcagcaccagattcaagccctccttcctggaaatacttgttgactcagtgactggcattctgtgcagcaaaccgcaggactaggctgaatgcttggtatttcagtaataatttcctgtgagaaggaaggaagtagttagaagaaagagcatgatcgtaataggaaactaaaaactgtgcatctatttcaatatttcaatatttaaatatatttaagcctgtcttatattaaaaaatcccctttttgaactctacttctcttactggcttctaccgtatcactctcttctttttttagaagcaaacatttatttatttatgcttattatttttttttgagacagtatctcgctctgttgcccaggctggagtgcagtgttgcaatctcggtttaccgcaacctcctaccgagttcaagcaattctcctgcctcagcctctcaagtacctgggactacaggcatgtaccaccacgcccggctaatttttgtatttttagtagagacggggtttcaccatattggccacgctggtcttaaactcctgacctcaggtgatctgctctcctcggcctcccagattgctgggattacaggcttgagccaccgtgcctggcctaaactaatacttaaaaagagtttatagttactatctccatttacttatctcccatctactcctgagcatcctagagtagatttattcccgttgtgcaaccaaaactactcttaccagtgtcgccaatgatgacacagttgcaaaatagaatgaccctttcacccttgttttacttggcgttgcagcccacttaccacagtccgccagtgctttgctttggaactgctgctctggccctcacactgttgggttctcttctacctcttcgcccgttccttttgagttttccttaccaccttctctgatgtgtccattccattccttaaatgtcattggtctgtagggttctgtcctaatgtcctcttctctttctatatactcatgttccctctgtgacttcagttataattgatacctgatgaatggcccatctctctctctctctctttttttttttttttgagatggtgtcttgctctgttgccccggctggaatgcagtggtgtgatctcggctcactgcaacctctgcctcctgggttcatgccattctcctgcctcagcctcccgagtagctgggactacaggtgcccaccaccacgcctggctaattttttgtatttttagtagagacggggtttcactgtgttagccaggatggtctcaatctcctgaccttgtgatctgcccgcctcgccctcccaaagtgctgggattacaggcgtgagccatcacgccggccatctctctctctctttaaacagagatggggtcttactctttcgcccaggatagaatgcagtggtgcgatcatagctcactataacttttaactcctggactcaagcaatccttccactttagcatcccaaagtgctgggatacaggtgtgagccactgtaaccagctaattttttttttttttttttgagacagagtctcgctctgttgcccaggctggaatgcagtggcgcaatctcagctcactgcaagctctgccttccgggttcactccattctcctgcctcagcctcccgagtagctgggactacaggtgcccgccaccacgcccagctaatttttttgtatttttagtagagatggggtttcaccgtgttagccaggatggtctccatctcctgacctcgtgatccgcccacctcggcctcccaaagtgctgggattacaggtgtgagccaccgtgcctggccaactgtgcccagctaattaaaaactttttttttttttttttggtagagacagggtcttgctatgttgaacaggctgatcttgaactcctctggcttcgagctattcagctacctaagcctttcaaagggctggggttacaggtgtgagcgactgtgcctgtcctccatctctctcgttctctctctctctctttttttttttttttttttttttttttttgagacagagtctccctctgtcgcccaggctggagtgcagtgacatgatctctgctcactgaaacctctccctcccgggttcaagcgattctcctgcctcagcctcccaggtagctgagattacaggtgcccaccaccacacctggctagtttttgtatttttagtagagacagcgtttcgccttgttggccaggctggtctcaaactactgacctcaagtgatccgcctgccttggcctcccaaagtgctggaattacaggtgtgagccactgcacccagccctccatctctctggaattgtatatctcaacagtttattggacatctgcttttgaatatgcaacatgtccaaaaaaactgaacttatcttgcctctaaacttgattgtttaaaacaaaattttagccaggtgcagcagctcacacctgtaatcccagcacttttgggaggctgaggcgggaggattgcttgagtccaggagtttgtgaccaagcaaagagtaagaccccatctccatttaaagagagacagagatggctgggcgcgatggctcatgcctgtgacctgggcaacataatgagacttcatgtcttaaaaaaaaaaaattagctcggcgtggtggcatgtgcctatagtaccaggtactcaggaggtcgggattgcttgagccccggaggttgagtctgcagtgaactgtgatcacatgactgcactgtagcctaggtgacagagtgagaccctgtctcaaaaaattaaaaaaaaaaatttcagtggatggtaccccacaaagatccacaccggaaatctggccaccatctttgattactcttttatcacccccacatctagtcgatcactcagtcttgacaatactacctgctaaatatctctcaagctgtccacttctttttccaaccttactcacactactgattcagccatttccttttctagatcactgcagcagccttctctctgattccacttttttgtcttcagtctaattccatgccactctaattcattttctgcagtgtgggtgaagtggatgtatgaaacaaaattctaatcacattttccctaatattaaagccctttaaatggttctctgttgccctcaggatgcactttgatctcttcaatagggcccccaagctttttttgttgttgttatattacaaatttaaaagaactcagtcttctccagcttcatctgtgctaatcctgcccccacctttcccccattcttgtactccaggtacacaacacatactttaattccttaaatacccctgttctctattgtatctgggcctttgcagttattctgtctgcctagaatgctcctgttacgcctctttcttatcaactttagttatctttggtttagacatcccttcttctgtgctatgctatgctaacaccccaaccccaggtcatgcttctgaagtacccagtacttacccctgtgtagcgcttaccatgccctctcaagattacctggtgaatgtattgtaagcattttgtatgcagggactacatgtctcactattgaatcctgggtcctagaaaagtagctatcacataatagatgctcagtaaatacacatcgttactttggctatgtttgccattaaatcaattaaacaagtggtacaaagctggtagggaatgaccaaaaatggggtcctaggcttcaatgttaggtttttttttttaaaagtaaagtcaaagttcagattattgcagttttacaggttggctatgggtcttaatgggcttatgggatattacaactgaatctaaactctgtccagctggtacagtctttatccaggcttcagtgttcttttttttcttaaaaaaaaaaaagctttattgagatataatttatatgccataccactcacccatttaaagtatattcctcaatgattttttcccagagcaagagtggaagtttattttattttattttatttttatttatttatttttttttaaaaatggccatgcatctgctctttaatgttttcctatgatgtattaaaataaaaacaaagtttcagtctcttcacaagaagtaatttatattctctgaattttttcagccacaacaactggattctcttttctgatttttgctgcagcttctgctttgtaatcatacggacagttgtgcttgtcagagttaacggtgaagtccacaaaacaaatttccacatcggcagtcaaacctgtaagaccaactttctttctgcacatgaaacatctgtttttctttggtttgggcaattcaggagctttttctttactctgagaagtactgggctgaaaaactgatgggctgggctgagtgacaactggctctcacacctctgttttcggggtagttattttgtcctctgttgaaatgctcatttctgtcatttgctgagttacaggcaaggcagccgcaggcacatttcttgatttttcagatgtgctgccagcagcaccttcacagttgtttaagctagtgtctgctctctgtacagatgcagaatctgaggtaggactgttggaaccactagctgtccccattgggctcattctgccactattctgctgcctctgaagatgttctttgtagcaaactgaacacattccatttgtcctaggatttccataaaagccacatcctgtgctacacagcatgggccccggggtctggttagtctcctgagccatatttttctgccaggtctgagttccaaccatccccatggccaaagggattttattttatttttaagatggagtcttgctcttgtcgtccagggtggagtgcaatggtgtgatttcggctcacggcaacctctgcctcctgggttcaaacgattctcctgccgcaacctcctgagcagctgggattacaggcgcctgccaccatgcccagctaattttttttttttgtatttttaatagagatgaggtttcaccatgttggccaggctggtctccaactcctgacctcaggtgatccacccacctcggcttcccaaagtgcttgggattacaggtgtaagccaccgcgcctggctggaagtttatttttaaaagtctttagaaaataaaaaaagagaaagtatgcttggaagacacccaagtgcgtgacttgaagaacaagtgcctgatttttagtatagtcacagaattgtgtaactgtcaccataatcaatcttcagaacatattcatcaccccagcaagaaaccccatacccattagtaattgctccttttttcaccccacccttcagcctcctctctccagcccctgggaaccctaatctacttctttgtttctgtgaacttgcctattctcaatatttcatatgaatggaataatatgtgttcttgtgactggcttctttcacttagcataatgttttcaaactttatccatgttgtatcatgtatcaatactttatttctttttattttttacttaaaatttttttcctatacagatgaagtctcactgtattacccaggctggtctcaaacaactgggctcaagcgatcctcccaccttggcctttcaaattgttgggattataggtgtgagccactgtgcccagccccgtttctttttattgccaaataatcttccattatatgtatataccacgttttgtaaatccattcatcagttggtggacatttgagttgtttctgcttttggctattacaaacaatgctgcttatgaacattttctttctttctaagagatggagtgttgctcggatcactgaaacctccgtctttccagttcaaatgattctcctggcccagccttctgagtagctgggattacaggtgcacacaactacacccagctaatattggtatttttagtagagacgcagtttcaccatgttggccaggctggtcttgaactcctgagctcaagtgatctgcccacctcagcctcccaaagtgctgggattacaggggtgagccatcaagcccagccgtggacatctgtgtatgagtttttgtatagacatgtttttatttctcttgggtatatacctaggagtgcaattgttgggtcatattattaccagaatggggtcctgatcaagtccccaagagagggttcttggatcttacacaggaaagaagtcagggtaagtctatagagtaaagtgaaagcaagtttattagagaagaaacaaaagaatggctggtccataggcagagcagccctgagggctgctggttggatatttttgtggttatttcttgattatatgctacatatggggtggattattcatgagttttccaggaaaggggtggcgatttcttggaactgagggttccttttcctttttgaccatttagggtaacttctagacattgccatggtatttgtaaactgtcgtggcactggtgggagtgtcttctagcatggttacacattataattagtgtataaagagcaatgaggacaaccagaagtcagttccatctgtatcttggtttgggcgtgttttggccagcttctttactgcatcctgttttatcagcagggtctttgtgacctgtatcttgtgctgacctcctatctcatcctgcaactaagaatgcctaatctgggaatgcagcccagcaggtctcagctttattttacccagaccctgttcaagatgcagttgctctggttcaaacacttctgacatatttcccccctcctttttacaaggggatctttaatcctaagggttgcagaggggcaaagatccatccactgtaacttctttaggctgactaggggcaatgatattcctgcctattagggtctcttgtatccagggtagagaggagctcagtcagaaagcctcagtatggtgagggcccgtcataactctgagttctgacaaaaggtgatatctgaaagactaataagtgctcaatttaagaaaacattgaataagcttttcttgcatttttacacaaagaatatgacagcaatatattccacaaaagtaaagcgaaataagtaaaattattccaagtgaactaaataagaaagcttttcatgaacggggcagttgttggaaccaagctgatacagtcactagctgattccaatacatgcccagaattaaaatattgatccagatttttacattaccttccccttttgtttcttctgagcagcagccagagatcactggttggttcacaggaagaagcagagtcagtctaaattgcagaaaaaactcaacagatgagactagaatctaataacaggtgtatcacggtttttgaaaaataatttttctctcattcccatttttattaaaaacaaatcatggtaggactcatttatttgcaaactaagttttagtcttattatactaggtctgattatttgtataaagtgcagcaagagtaattatttgccatataggctctttttaaattggatttgatggaactttgttccataaggaatctcagattagagcttttaaagcactgatcctagccacgggtttgtaccttcaaatactcgtatgaattgggtacatttctttcctctcaatttcccaggataattgggactcctgggccagaaagtgacatttttggccaggtgtggtcgtcacacctgtaaccccagcacttttggaggctgaggtgggttgattacttgacgtcaggagtttgagaccagcctggctaacatggtgaaaagcctgtctctactaataatacaaaaaaaatttagcctggcatagtggcacatgcctataatcccagctgctcggaggctgagttaggagaatcacttgaacgtgggaggcggaggttgcagtaagccaagatcatatcactgcactccagcctgggtgacagagtgaaacactctctcaaaaaaaaaaaaaaaaaaaaagtgacattctttagaaagtgacattctttacttaccacaggtcaggatcgctgtacaaggactgcatagacaaggcacgaggccagttttcccagggggctttttctgactctgtaagtcaactttgattccttaaaagtagtctttttgtacctggcatgccattccagtcaaagccttcataaaagaaccattgtctccaatggtgtcctgttacgaaagaaaacagattgttattgtacttgtgcaaatattgccatagtcaagaatacttacagtttccaaattttggagaaagaaatatgctccaaattttctttataggaatatattttacttgttaaaagctgtaaatagctcaaaagaaaagtattcttgactctgaaaagacagaaaggatcagcaatgttttaggcaaaaagtcataaaaagattattttcatcttttgttagttcagtctatgcaattagttcctgtttcactcaacatttatgtacacattagttttccaagagagtctttgaagttctttcttctctattttaatggcacactttccaaagttatcaaaggcctgcatttaagagtactcatcagagtcctatagctgattataaactgctctttaaagaggatcaaaataagacaacaattgtctgtggatgacaaaaattattatggcagtcatggttacttctgtggcatacaacaattttacaaaacaattataattattactgataatatacactaagtcatatcagtattataggagtatagcataattttggaaaacataccaataacacatttatacaaatacacccaaagaaagccaaacactgtttcatatttgacagtgcttcctgtatgattttaatataccaaataagccaaatatgtctcttttggactttagggtacctgatatctaaaggattaatcaggtcagaaaaaggcaacttataatttgattttggaaagttttcaaatattaaagttttaaaatacttgatataaaatagaatcccagcacactgtaagtcattgagccaaaatgataaagattttaaaaagggaaaaacctggccgggcatggtggctcacgcctgtaatcccagcactttgggaggctgaggtgggcggatcataaggtcaggagtttgagaccagcctggccaatatggtgaaaccccgtctcactaaaaatacaaaaaattagccaggcgtggtggtgcacgcctgtaatcccagctactcgggaggctgaggcaggagaattgcttgaacccgggaggcggaggtttcagtgagccaagattgttccactgcactccagcctgggtgacagagtgagactctacctgaaaaaaaaaaaaaaaaaaaaaaagggggggaaaacctttactcattgatagagggaagacttagctttccaaataattttctcttttctttcattctttttcctgtagtttattcaaaaggcaaacaaaaatctttcattaaaaaaaattacacaaaaatcttgttcaagagtgaaagccaagtctcacctttatgttagtgtactatattgatgttaaatccagttcttaataaaacctaatagacaaatctgttcaggtgcaatggctcatgcctgtaatcctaacactttgggaggctgaggcaggagaatcacttgagcccaggagttcaagaccagcctgggcaacacagtgagaccctgtctcttaaaaaaaaaaaaaaaatcttttttttttttttttttttttgagatggagtcttactctgtcaccaggctggagtgcagtggtgtgatcttggctcactgcaatttccacctcccaggttcatgccattcccctgcctcagcctcccgagtagctgggattacaggtgtgcatcgccacacccagctaatttttgtatttttagtagagacaggatttcaccatgttggccaggatggtcttgatctcctgaccttatgatccacccgccttggcctcccacagtgctgggattacaggcgtgagccaccgtgcctggccaaaaaaaaaaatcttatacacaaatctgcctaatcttaatcgttttatcataaggttagattcttataaaccttttataactctttacagtttttttttggttaaagaatagaaccatgctctaagaaagccatgttatgcttttattccaatgttcaatttacagataaattgaataatacccctttaattttagccagtatattctcatacagaatttcttttacaacactaatctttcataaacctttcacaacttactcaaacatcagctttatcctatcctttaactctctaaattagggaaaaaaacacatccccatactttcttataatcttttaccaaaaacacattctactttccttatataccttgcatgtaaaactgtttctctagtagtctcaattacatatgttacaatgttaactcttagcaacttttatttttggtgaaagacctggtaagtaagcaattttatttatgtgccaggtgtgtagcctaggacaccagacagaaatgcagataaggtctgactatttccaacatagttgggggcatggataactccatatgtccccaggccttacctagaatctagctacaaagcaggtaagttgtacaagtatcaaaagtcaaagaagtagtttataaccttaaaccgtctagcaaagatagtatttgacctacctaatttagactaaatgtcttaagttttgaagatgtttttattttaccaataatcttgaaaagtgtctttatttcataaagattactaaagtcatgtgaactaaaaggcattaaagtttttatttttctgacaaaatatttgatttcagcacttttcttaaagccaattaattggagctttttatataaataccacacacacaacacatataaatacacagacaagaaaaacaaaaacaagaacaaaaaacaaaacttagatacacagacagaagcagaaccaatagttgtaagatttttcatttgccagtttttaagtttttctttcccattttatgaaccctatcatgacttacacagaccatctagactttctaacttgtcttacatttccctttttcctaaataatcagtcattctactttaggacaaggatttaccatacaagatcttttctcacataatatttcttttctttataactttccttaccaaaaatacatcttcatatccataactttcttcacacctctctcccctactgtttttttctctttctaccttttttctattttcttctgtcccctgtcctaattgtcagctaagcaatactaaattacatttccaaagggccaactcttagatgaaacaaaatagagaattcatgttttattcaaaccaaggaaaagtggtgtgaataacagttcagttaagacagccagggccaggcgtggtggcttatgcctgtaatcccagcactttgggaggccaagttgggtggattacctgaggtcaggagtttgtgatcagcctggccaacatggtgaaacccagtctctaataaaaaaatacaaaattagctggacatgatggcgggtgcctgtaatcccagctactcgggaggctgaggcaggagaaacacttgaacctgggaggtggaggttgcagtgagccgagattgcaccattgcactccagccttggaaacaagagcaaaactctgtctcaaaaaaaaaaaaaaaaaaaaaaaaagacagctaggaaaaacatacactcttacacatggagatttctctaaggatgtaagttaagttaattactgactggctttcgggtggagccttttaaagaacaatgccagggaagcatgcggtttctagaacctaataagcagacacagctggaaggcaaaacagattccccaagaattaacggacccattttttttttttttgagatggagtctcgctctgtcgtccaggctggagtgcagtggcgcggtctcagctcactgcaagctccccttcctgggttcacaccattctcctgcctcagcctcccgagtagctgggaccacaggctcccgccaccacacccggctaattttttgtatttttagtagagacggggtttcactgtgctagccaggatggtctctaatctcctgacctcgtgatctgcccgcctcggcctcccaaagtgctgggattacaggcatgagccactgggccctgccaagggacccatttttgtactggatcctggatcccaaaaaagaggtaatcagcccatctcccatgggagacttatctctcagtgggagttgtggatgtttccataccttttaggtggctgagagcatgtttctctgatccaaacatgcaaagagctgagtatccccccataactgccattagccgtcccttaaatatatttcctacctagttattacacatggaggctaaaagctctctcataatgcaaagtaatttcttttttttcttttttgagacagagtttctctcttgttgcccaggctggagtgcaatggcgcaatcttggctcactgcaacctccgcctcccaggttcaagcaattctcctgcctcagcctcccgagtagctgggattataggcatgcaccaccatgccccgctaattttgtatttttagtagagacggggtttctccatgttgaggctggtctcaaactcctgacctcaggtgatccacctgcctcggcctcccaaagtgtggggattacaggcgtgagccactgcacccggccaatgcaaagtaatttctgataccccccaaaaatcaaaatgtcaggtaatgcagtgcaaaacagaacagagccttagattttgagaggcatctatcctcttttattttgtattttttgagacagagtcttgctctgtcacccaggctggagtgcagtggtgtaatctcagctcactgcaaactccgcctcatgagttaaagcaattctctgcctcagcctcctaagtagctgggattacaggcgcccgccaccatgctcagctaatttttgtatttttagtagagatgaggtttcagtatcttggctggtcttgaactcctgacctcgtgatcgacctgcctcagcctcccaaagtgctgggattacaggtgtgagccaccgtgcccggcctatccacttttaattgctggggttccatgaagaaaagagaagtttccccaaaatggggtctgtgtcacccctgtttttcccaaggagtcccagctgtcagaaattatcttaggtcctcttatgtgggcatgaaggtggcaagaataaaaactggagaaagagaattcagtcgtctgagaagaaaaagtttttgttttttccagaaaagtaagatccaagaaaaaaaccataaaggcctttaaaacgtatgcatcgcttggacatctgctttaaattaagccagcttttaaccaaatctcttattactagattctagttaagacaaacagccaatatttctggcttttggactttaccaaaggtaacttcccagatgaaaccaataagttttaactaaggttatgacttaactgtgggtgtaccgggtatttccaaagagttggtaagcagtttttacaagatatagaatctctaaaggtagcacagagaaaggaaaatttgagaagggaagccagaagttgttcatggatgggggcacatgttctcaggatctcctgagggttatgtcatgggcaaaaacaaacaaacaaaaagtaataaaaataaaaaataaaaaagaagttgttcatggagaggaaaggaattaataaatggtaaaggtcacacaaataaaccagaaaggacttattccccaggctggaaattgaacccaggccaccattgtgaaaagatgaaatcttagctactgagctacaacattgggcagtttctgttattcttcccagaaggagcctagagcagccaattttgaacttgctaaggcttttaactgctcaagataatttttagggctgtgacatgagcccccaaattcctgccctccagatggcagagaccaagagaaagtaccatggttacaatgtcagactcccaaggacataaaacaagatgaaggagaaacctcatccaggtttttggtttgtttgtttgttttgttttttggtttcattaaccagcagcaatttgtaactgaacagctttctggggtggcttgaacagagggcttacaggggtccttggcctgcattctatcctgtggtatctctttttatgacagaacgacacagaaagacaaattcatagcacaaattacactggatttgttacagcctaagattagcttcataaatcctttttcccagtaatgaaaactttgcagaggagataaaaagtgatttttaccatgcattcaactggtttgcgcacagagagagagaggaaagggaagggagagggagaaaagcattgcctgcagcagggcaggggaggcaaggagctcggggggccagggaaagacccacccattgcagcgacactggatcaaatgttcaggcagctgatcgtcagtcttgaagggatcttttctggtagtctcattggctctcaagtttccccctttagggagaaaaaagctccctgtgtcccacgatcctgtacatgcctaatcctatcactcatagccttcagcaaagagcgcaaggcagattaatccaaagagaatagtggttaacatcccgtagtaccaaatccatttttaaccaagaacagtgttaccaagggagacctctaactccctatgtcttaggagggactctgaccttcctaagttgagcctttaacccaagttcagacaagcgtctttgccctttactgtgatgggccttttaaccccttatgcctgcctgtctgcctgcctgcctgcctgcctgcctgcctgccttccttccttccttccttccttcctccctccctccctccctctctccctctctccccctttccctccttcctttccatcttccttcctccctccctccctccctccctcccatcttccttcctccctccctcccttccttccttccttttctcttttaatatataaaaatttttagctaatcttctgtgtatcagtccaattttagtatatgtgttgctgaagcgagcacaacccgctatgtcttagaaggtattctaaccctttcaggttgggcctctaacccaactttgtcctttacccaggataaaatgtaccccagcacttacccagagtcagccaattggtgctgcatggataattttcctttggagtcgggggtctctccagtattgtcccttcatggttctctggaagatgttatgggaaatgggccccaatccagaccccaagagagggttcttggatcttgcacaagaaagaattcagggcaagtccataaagtgaaagcaaggttattagagaagtaaagaaacaaaagaatggctactccataggtagagcagccctgagtgctgctagttggctatttttatggttattttttgatcatgtgctaaatatagggtgaattattcatgagttttccaaggaaggggcagggatttctcagaactgagggctcctctttttttttagaccatatagggtaacttccagacattgccatggcatttgcaaactgccatggtgctggggggagtgtcttctagcatgctaatacattataattagtgtataatgagcagtgagagcaaccagaggtcagtttcatcgctatgttggttttggtgggttttgaccaccttctttactgcatcctgttttatcagcaggggatttgtgacctgtatcttgtgttgaccttctagctcatcctgcagctaagaatgcctaacctcctgggaatgcagcccagcagatctcagcctcattttacccagccccagttcaatatggagttgctctggttcgaacacctctgacagtatggagggtttacaattcttaagaagagagaagttgctgagctttagagaataagctgaaacatgcatgaagcactaataactcttgccctgtactttgttactttagtgataaattttacagctggttctttgaataatttatattaattaagtttctctgtctgatgtgaagtagccagtgaataagcaaagcctaattctccaataaagataataaagcccttcttgagttaaatggaagtgggagaatgtcatgtctgtttctgtccatttccattcctgctccttctcctctggacgaaacagggctggctgatggaattaaccaggaaggcttcaaatggggaaattggctcatttaaactcctgctagtattaaactgttcctcagtcctatgtaagttaagacaaaaaagttatgaaactcatgtgagttataggtataggattctgttaacaagtatatcatatccagataaatatgggcaccttaaaagtagttgtcctgggaataaatacacatctattcaaaaaattctgtcatcattactcaaaatattttggtcaacttgccatgtagagttactttcaaaaccagtctgaggcctacaagaaaatcagtttcacttccttataatcacacttaggatttcagatacttgctagtctgtttatgtttattggccttttttaaatagttacccctttttatttctctagccccaagcaaggaaagctctgggttcacatagtgctccaagtacaggacaaggctcacatcatacagagcctaagcaatgaagaaagattggcatgcttcacaagactttgacctttaaacaaagcatggtcagtctgttttctccagtgtcctgtttctgctttgtgatcccctcccccactctttttgtattaaagaacccttaaacctgaggctggggacatggccttgaattgtcctctcagaggaaactgggagaatgggtagagcgaggtacttcagaggtctctttttccttctgctcgtgggtagttagttaatgatctaccagcagtccccactcttggggagactgggatcatgttccagccgcacatcacagcttagggcagagggcactttgtacacagagggagctgcatctgactttcctacttcatctgtagagtcagtagccatctgtagtcttgcatgttctcagttttcaggctccggatatgaaaatggatctttcaattttctttctctctgactctgctctgagggaaaatgaggacgtttactagcagaggaaaaagaaatactgaagtttgcaaaaattgatagaaagctgggctccctgctcatcatgcctccttcctccctagcagtttctaaaccctcagaacattacagtgagattttagctgatggtacaaacatgtctacaggatttcctcaagctggggctacattagaaggctttatactttggccatctgacctgcttttctcttttccagagtattctacttttcacaaataggtatgatctaggagttcagcctccctcacccttcactaattgcagaataagcaatgcagaggctgttcagagagtatcttatctgtggggagagggagaggaagcactggaacacttgccaggggagggaccagagggcataattataaatgaacaaccctggagcagaataggggatgagttagacacaggaaggaagctaaaggaagccagagaatttcaggaattgagggtatcacatggagaaataaagagcgagttagacagaggctgttggtggtccctaccctgacacctgaaagaactcctgatcaaggcctactatgggcatagtcttaggctaggttttagggataaagagataaataagacacagtccttattttacaagtttacagtctaacaaaaaggagataaattaacaaattggaggagatttttcagaatgtgtggtattgtgggctaggagtctgctaccattgctaatagctggcatttattttttacccaccgtcttctaagcattttatgcattaaataactcatcaactcctgacatcggccccttgaagtatatattactattgctataatccttgttttataggtaaagaatctgaggcacagaggcattacacatagcctgcctgaggtctcacagcaggcactcagaagcagaactccagcacaggtagtctggttctagaacctacgctcacactaacatagctgctaataagtcatgtggggaagctctgccacttcatgtctacatgcctttgtacccgcttgtctttccttggcctgagatactcttccttaaagcctctggtcaacgagggactcttctttgatatcttctctgactccttctgcctatcccagagccattgctgcccttggagcttacccaacactttgtcattgtattctatttgttggaatgtctgactccttttattataagcttctggagagcaaggaatttttattctcggaaaacagttataaaagtagagccaataatataatgagtttacatgtacttatcatccagcttcagtgatgaacatttcagttcaatcttagctcatctatattcccccttccaaccatgaattattttgtagaaaatcatagacatcaaatcatttcatctgtagatatttcaacttactcctaaaatacaagggcattttaagaaacagtatcacaagcatatcagaaaacattatcacagtaaaagattatttcctccttggctgggcgcggtggctcacacctgtaatcccagcactttgggaggccaaggcaggtgaatcacaaggtcaggagatcgagaccatcctggctagcacagtgaaaccccgtctctactaaaaatacaaaaaaattagccgggtgtggtggtgggaggctgaggcaggagaatggtgtgaacctgggaggtggagcttgcagtgagcggagatcacgccactgcactccagcctgggtgacagagcgagactccatctcaaaaaaaaaaaaaaaaaaaaaaaaagattatttcctccttaatatcataaaatatccagccaatgatcaaatttctgcaattaccttataattgttcttcctttccgtttttcatttatttgttctttgattccttcctttgttctttccctccctcctcttcttttttaaatagtaagattgtttgaaccagaatccaaatcagaaggactttattttttaatgttcatattctctttaatacctagcttagtatttgacatatagtaagtcctcaataaatgtttgttaaacaaataatcagaaacctagaaaaggtcctgtttgatatttggttggtttcttggaatgcctttcaatttctgataaccttagtttttcaggggttaactttggtgctagctattgtcagtgtatgaacattgccagaggtttgagggcaatgggtatatccttgactcagacatttctaggctaggaggaaatgggggtccttttttttttttttttttttttttgctttgagacagagtctcatgctgtcacccaggttgcagtgcagtggcatgaccttggctcactgcaacctctaccttccaagttcaagtgattcttgcgccccagcctcccaagtagctgggattacaggcacgcaccaccatacccagctaattttttgtatttttagtagagacggggtttcaccatgttgccaaggctggtcttgaactcctggcctcaggtgatccgcctgcctcggcctcccaaagtgttgggattacaggtgtgagccactgcgcctggcctggtccttgctttcttgtttctgttttttgtccttggtctctgtcatgggctgaattgtgttcccttaaaattcttctgttgaaaccctaacccctggtgtctcagaatgtgactttatttggaaataggggctttaaaggtgattaagataatgcctgtagggtgggccctaattgattctgactgctgtccttgaagaggaaattgggacacaatgagagacaccacagatgtgtaggtacagagaagagaccatgtgaggagacagcaagaaggcacctccaaaactatgagaaattaatttctgttgtttaagcaattcaggctttctggtactcagccatatagtcatatggcagccatatagtgttatagcagactaataacagtatcttactgcacgttaaattgtcgctcactcctgtaatcccagcacttgtttaggccgaggcaggaagattgcttctgttcagaagttcaagaacagcctgggcaacacagtgagaccctgtctctacaacaaataaaaatattagccccatgtggtggtatgcgcttgtggtcccacctattcaggaggctgagcctgggaatcgcctgagtctgggaggtcaagactgcaattagccatgattgtgccactacactccagcctgggcaacatagtgagatcctgtctcaaaaaataaaagttgggggccaggcacagtggctgacacctataatcccagcactctgggaggccaaggtaggtggatcacttgaggccaggagtttgagaccagcctgaccaacatggcaaaaccccatctctactaaaaagaatacaaaaattagcctggtgtggtagcatgcacctgtaatcccagctactcaggaggctgaggcacgagaatcacttgagcccaggataccgaggttgcattgggctgagattgtgccactatactccagcttgggtgacagagtgagactgtctcaaaaaaaaacaaaacaaaaagttggattgatcatttttggcttctttgccacttcctcagaacaggattgtaaaggagtttccagaaagcaccagtggctttatgtgtgcttggtacacagaattctaagatggcccctaatacctagaactatgaatatgatgagaaaccacacccacgattatgttaccttgtgtggcaaacaggattttgaagacataattaaggttacaacttagttgattttgaattaatcagaagggaaatgatctgagtggacctaatgtaatcacatgagctttttaaaagcaaaatcagagctttttctcaggctggtctcagaagggaaaatcagagatagtagaagtgtgagagggatttgacttgagagaggttctccatggctaagatggaggaggtcacagtgctaggacctgaaaaggtcttctaggagctaataatagtccctggccgacaacaggacagtggggaactcaaactgacttcaaggaactgaattctgcaaactaatgagtaagtgttgttttaagccactaaattagtggcggtttattgtatagcaatagaacatgaatacaggtgctttgtacctgatagattgaattagtggctcctttccttagtttatatttaaaacttgaagtaaaattaaaatacattgaaatgtctatagatctcaagtatacaagttgatttttggtaaatgtgtatacccatgcaatcactacctgaattgagatgtagaacatttccatcagccccagagctcccttgagcatctttgtcattaatcccaccctctagggcgaattctgtttttttttttttgagagagagtctcgctcctctgtcacccaggctggagtgcaatggctcgatctcggctcactgcaagctctgcctcctgggttcatctcattctcctgcctcagcctcacgattagctgggactacaggcagttgtcaacacgcccggctaattttttgtattttttagtagagacggggtttcaccgtgttagcaggatggtctagatctcctgactttgtgatccgcctgcctcggcctcccaaagtgctgggattacaggtgtgagccatcgcgcctggcctagggcgaattcttaacatctttaattggaattgcctattctggagcttcatttaaatggcatcatataggctgggcataatggctcatgcttgtaattccagcactttgggagggccgaggcgggaagatcacttgcctccaggagttcaagaccagtctgggcaacatagcgagacctcctctctataaaaaataaaaaattagccgggtgtggtggtggcatgcatctgtagtcccagctactgaggaggttgaagtgggaggattacttgagcctgggaggtcaaggctgcagtaagccgtgatcgtgccactacactcggcctgggtgacagagtgagaccccctctgaaaaagaacaatgacattatatagcatgcactcctttgtgtctggcttcttttgcatggtataatgttttcaagatttatcttttttttttttgagatgcagtcttgctctgtcaccaggttggagtgcagtggtgtgatctcggctcactgcaacctctgcctcccgggttcaagcgattctcctgcttcagcctcccaagaagctgggactacaggcgcgcaccaccatgcccagctaatttttgtattttttgtacagacagggtttcaccatgttggccaggatggtctcgatctcttgacctcatgatccacctgcctcggcctcccaaagtgctgggattacaggcgtgagccaccacgcgtccttacagggagggtctcattctgttgtgcaggccggagtgccatagtatgatcatagctcactgcagctttgaactcctggtctcaagcagatccttccaccttggcctcctaaagtgctgagattgaaggtatgagccatgctgccagcccatccattttgttttgtctgtagattgtaccctttgattgctgattagtatactatggtatggatattccgtaatttgtttatccattcatctgctgatagacatttgggtttccagtttttggctattatgaataatactgctatgagcattcatgtacaactgtttgtgtggatatgtattttcatttctcttgggtaaatatctatgagtaggattgctggattgtaaaagtgtatattgaactttataagaaagtgtcaactgttttctagagtgggtgtgccattttatatttcccctagcaatacataagaataccaatcattccccatcctcacttggtatggtcaaatcttttaaagttcagccagttgccaacaatttcttcttgagtacctctctgtgctttgcagaatagattattcatctcatgcccatcatatagtatgtccttccaactctttttataatttaattcctacctgtgcttcaggacactgtttcctaacacggaataaatgtgagaatcacttgggagtgtttcagaatacacaagcccaggtctcactacaggcatattgtatcagcttttccagggatggtatatatacttacgtatgttgaaaacgttccctaggtaattctgatgcatacccctagctaaaaaccattgatttagccccaggtcttacctattagctccatcctggctatatgttagtagtgtctgggaaggcttaaaaattacaaagcctgggccgggcgctgtggctcatgcctgtaattccagcactttgggaggctgagccgggtggataacaaggtcaggagattgagaccatcctggctaacacagtgaaaccctgtctctactaaaaatacaaaaaattagctgggtgtggtggcaggcgcctgtagtcccagctactcaggaggctgaggcaggagaattgtttgaacctgggaggcagagcctgcagtgagctgagatcatgccgctgcactccagtctgggcaacagagtgagacttgtctcaaaaaaaaaaaaaaaaaaaaaaaaaaagtttacaaagcctggatccctctccagaccaattatgttggaatttgtgggtggagtctgagcatcagttgttcttttaaaaaattccccagttattccagcgtgcagccacatttcccattagatttctcttgacttcttgtggcatttacgcctttctttttcggtattatgattatttttcaggtcttatctcctgtcttgggctttatattccttggggtagggaccttgcctttttcatttctgtatctttcatgaacacatgaattggtcatcaggaagagattctcagccacacataggttgtgtcctgggtctcaggttcacatgttaatgctacagtctttgttctccacaaggtcagaggttgcttgcgatgaaggatgtgggtaactccacagtgcagctggtagatggaggtcaccctgtttggtatgtttttaggtgtagccttggaactaagaattctgtgtgtggggtggaggggcagggatatgtagggagagagatctaattaggatggaggaattatacaaggaagtagtgataaaggaaggaagaaacttcttttttttcttttttttgagatggagtctggctctgtcatccagggtagagtgcaatagcatgatctcggctcactgcaacctgtgcctcccaggttcaagtgattctcctgcctcagcctccagagtagctgggattacaggcgcccaccaccacacccagtgaatttttgtatttttagtagagacagaatttcaccatgttggccaggctggtctcgaactcctgacctcaagtgatacacccacgttggcctcccaaagtgctgggattacaggcatgagccaccgcactcggtcagaaacatcttctctttagaagaagtttgaacttatctaataggccagagtaggccactgtagatttttgaataggggagtgtactaggagggtaatgaggcagtcatatgcaagaaagatttcggagagactggagacaagaagtcaagcaagactttgagtgttgttgagggtctgggtcagttaggtttatgggaatggtgagaacagcataactgacagttgttaaaaaaggatcaagaggctttcacaatgtattgaatctggaaacaaatgagcaggggctgtggaaacttagggggtgtcactgggagaaatgagtgagctgtgtgggagagcttgtttaaatgggtaacttcagacagtatttggatgtgggtgtcatgagttctggaagtagttggggctagagatataaattaagagccatctccagagaggtcactaagctgatgaaagagggtagatggagggagacaagaagggtctgagtactaaatctggtgtgggggagcagtcgtaagtgggaaatggagggaggagagctttccagaagggaaaagttgtctgtcatcttagatattgtaaaaggaaaaagtgtgaggtccctaaaaatgcctttggatttggccaagacatggatactgattttgtgctgttcccagcgatcttgggtagggaggcactgcagagggccaggaaaaattaggtgatgaggaaaggcaaagacaacacatgtgtttcaattgcttggaagtgaaggaaatgaggttatagcttagtacttagcagaattaataaatgaaggctattcgggttagaagagatccgaccctcctagagggcagaataaaggaattgggaaccaggaagagttagaaggtctagagggatttctatgtgaatgaacctgtggagacccttgtatagctacatctgattcactggagccgctggtgtgggaagtgttgttggcccctaatgaagaggctgggaggtcttttactcatgagatcatcttccctcccagaggaagataggcacttcctcccaggcaagttggagctgtggtctgttgctcccagatatactcactttgttagcaggtatgcaaatgaatttagctaattctctgatcactagatcaaatatctgtaggcttaaaaatagtttcacggccgggcgcagtggctcacgcctgtaattccagcactttgggaggccaaggcgggcggactgcctgaggtcaggagtttgagaccagtctggccaatataatgaaaccccgtctctactaaaaatacaaaaaaattagctgggcatggtggcatgcacctgtaatcccagctacttggggaggctggggcaggggaattgcttgaaccagggaagtggaggttgcagtgagcggagattgcgccactgcactccagcctgggcgacacagtgagactctgtctcaaaaaaaaaaaaaaaagagttttactctgactccccattgaacaatttgtttattctgcctgtagagaaaaacattgtccaaggtagtatcaaccatgaggcagcatgtcgatgtctgatatattatttttattataaaaacatagaataattttcatacataattcagacatgatcttagccaggaaaaattaaataacacagcacagcatggatgagggaaagtatgcacagtccgtgtcagggttagaaaaccctgaaagaggtacctgagtatagagaactccaagctaatcctcctggagaaagcctcttaggcctaacatgagatcaggtaagcaatatagaataaaacctttctcttagccccaaagagattccatctgtgtagaagactgggtgagaagtacatttgcctgtcttcctcctgtccttcctttttattataagatacatttatagaccccatagaagaaaagataaatttcagaggctgttaaaagaggctaggcctaagttataatcctcctcctcacagccccatttccccaaggggcattagcaccagtgcagctttctagctgtaaacaatgccaccagcatgagtgatagtgtccctgtagggtgctcccacttctcaaggaccaaatacaccttagcagaggccaaggtttcctgacaaagtgaatgggggcaaacagaaaatgcacaggtgcaaacatggaatagaatggtagttgatgattggtctgaggtgcctagaaactgagttaaatctagctctagccatgaatgaagaaaaccttttcttattttctatttggagcctctgacaaaaaaaatcttgagaggctcctgaccaagggacctgagggatttcggtggtttctttcacctaaggcaatcggattggctgacatagctaagctaagtaaaaataacccttttcacataaataagcagttacaaaaattaaaatggtggaatgtctcagagaaaaggagaaaaatcccaataccccaaattgtgtattctttaacaataatttaaataatcgctgaagggcagctctctgattcctttcccaagttcctagcagattgtgtttatcagaagctggttccctcctgaagctataacccctccctctcagcactgccttgaacagagcccataaagatattaaaacatatatgtgcttttgcattttccatcaggaattgccttggattttggcaagtgattttcctagttgcttctagtgggttctctgaagacaggcttgccagaaggattaggtggtattctagctaagcaccaaggtgcttagaccctgatcctacaggtagacaaccctgacagtggacaaaggtgtggcatttcactattggttatatatttgattttcttgtgtttggtgagttcacacaaggctttggagaaataggagaaggcattactgcctttactttctctctctcttgtttcctggcacatgtacttaatggaaaaggacataacctcaaggctatggcaaatccgaattagagtgataggacaggactgggggtgggaaggaatgagtgctctgaacaggcaagtttaaaacaagtccaggttgggaaaaggggaagggaggggaagttctggtccctctttcccaaagtcagctttgccaaatttcaatgacaagaaggttgggtttcctacagactcccaatgtactttcatctattgacactgagagaggggcagtgaccaggcagcctggagatgcctattaggaaggaagagtaggagaaagttgtttctgtccccacccctctacccctacaggggaaaggaatctcctagtgatgagggtgagagacttgaaatacatcagcactgcagtgagcaggacaggtttcattactgcttttttacttctgaataaattatttctgtggctgttagggatggggaggctgaagttggttgtgtgggttgctgggcttcaaagttcagggtagaataagtaacttcattcatctgaaaagcacaaataatgatcagttaagtcagtgacacagggcagggcctcaccttgcctggtgtgattcagcaccacaagctgttaccattttgaaattttagctctggagaagggcttttgttgttacccattctctgcttgctgacctcctgatgaatgatcattagaagagagaaattatggtatatatgcaatgggataggataatgcagcaatgagaaccagcaaaccacaaatacatacaatatggatgagtctcacaaagcaatgttgaagaagccacatataaggatatgttttatttctcctttagataggaacaaaaccaagcaatactaatctggagcattagaagtcaggatagtggttactcctctttggagggaagtgactggtagagttttttttttttgcgacggagtctcgctctgtcgcccaggctggagtgcaatggcacgatctcggctcactgcaagctctgcctcccgggttcaagcgatgctcctgtctcagcctcccaagtagctgggattacaggcatccactaccacgcccggctaattttttgtatttttagtagaacaaggtttcactatgttggccaggctggtttagaactcctgacttctagtgatccacctgccttggcctcccagagtgctgggattacaggtgtgagccactgcacctggctggaagggtctctttttaaggggaggtcatgtagtatttcatgatttgggtgctgcttacctgggtgtgttcaacttgtgaaagttcatacattgtgaaagtataattatgatttagcacttttcagtatgtatgtttgctctattgaaaaggtaaaatgaaaacttcttttttttttgagacagagtttccctctgtcgcccaggctggagcgcaatggcgcaatcttggctcactgcaaactccacctcctgggttcacgccattctcctgcctcagcctcccaagtagctgggactacaggcgcccgccaccacagctggctaatttttttgtatttttagtagagctggggtttcaccatgttagccagaatggtctcgatctcctgaccttgtgtttcacctgccttggcctcccaaagtgctgggattacaggcatgagccactgtgcctggccataaaatgaaaaattctataaaattattattaaaaaacaggatctcagatctattaaaattgaaattatccttttgacaataagagcaggatcagactgaaggtaggggagtgagaatgattcagtgccttccttttttaggccattgtgctgggtgctctttgtaggttatctcgtttaatcccttcaacttctctttgaagtaggcagaatgcccattttacagatgacaaagctgatgatcaaagaggttaagttacttgacaagggtcacagagctactaagagtcacatccagtattcagacacaggatgggaataattccaaaatgcatgttcttgctgcaaagtagactcatgggagtgattacaaatacgtctttgttgttgcactgaggaacattaacccaaacttgatgttacattgtgtcttcatgaataatcaattctacacagaatcatttccatgagaaaataagcccatgaaaaccggctatgcttaccttgttaggtgggtcattggagtggtcctgagctggagaagcaaaagaagagttagcgatccatggaaatgcaaagctgacttcaggtgattctagctgaaggaggtggcagttggagggtggggagtttaaggatcagttaaggaatttacttccctcagagtgtatggtccagacccagcatgttagtaccagagagggggcaggggcagaaccacaggaggccacaatccacttgtgaagagttctaccagttcacaaggccttgatttttgcccagatgtgtttctcagcaacatgctccagtggcaaggaggggcattgagacttgtagcacccacagcacccacaagataaggaaagtctcaccaagggagagtgcccacatccgtaatagaggcaggaggcggaaggagtaaggctgaggaaatggctcctggaaacatgggatcttcctcaggcctgcctggcctaggcagagtgagcctctctcctcagatgtgtctcaggggactcctgtggctaggaagggtgggaagacctatgccaccttagggttgggaaatagagatcctttctgtgaaaattcagaagggagggagtggtttgggaatccaggattccctgccaggggagggcacgtggtggaacataccagttctcactggggtaagtggctttacttactgtggttggagactgagggtttgtgctctgtgagatcacgctggtcgcttgccctaaataaatatcagaaactgtgactgctattcccaagcacaggatctttgttccgtaagttaggaaggacactgtgagcaggtaattccttagagtccttgatgttcatactgcctttcttctgagggcctcgttcttcagtctaactacaatcccttctagtgtttactcttttcctgtttgctggatgttcacatttcatttcattctttatcagctgcttctgtgcctacttctatccttaaaacctttcccattttgttttccggggtagatacttttttttttttctctatttattgttcaagaggactttggttgtttttgctttctcttaggttctcttcctatgctatttctccctcctcttccaatgtggtcaacagagcacatgacttgctttctcctgctgcttctttcattttttcatttgttttccttcttagaccttgctttccctgactaggggacagaggaacatacttgagtctcttcctctagattagatggggattggaatacccatgtccaagagataatgggagacagggagcacgaagaccagggaagaggaaacctgtgggaattagtgccgagaagcaggagtttagtgggaggagtatgagatccaggcccagagacaggcaaagaattctttccctctcccaagcatggcagtcagccttggaggaaacagaacaagaggaaaggccatcatacctgccggtcttcccgaaatgcagaaaacatgccagggctactgctatcagagcaaccagggccactactccaatcacaatgccagcaatggccccaggtgagaggccattttcttgtggtagagcattatctgtcatggagagaaaagaggagaagaaatgaaagtgaaattattttacaatgggggctgggaaacaactctcagaatgaagtagtttctaattgttccttcaaggaatacagtttcgttgtgggaaggttgctggaaggtgattagctaactatatccttgcaatttttttttttcaatcaccatgtttctttttttcttttcttttttttttttgagacagagtcttgctctgtctctcaggctggagtgcagtagcatgatcttggctcactgcaacctccgcctcccaggttcaagcgattctcctgcctcaggctggactacaggcacgtgccaccacacctggctaatttctgtatttttttagtagagacggggtttcaccatattggtcagactggtcttgaactcctgacctcatgatccgcctgcctcggcctcccaaagtgcttggattataggcgtgagccactgcgcccaaccccagtcaccatgtttctaggttgatgatctctcttctgccaattccaccctggcttttctgcgctcagccatttttaaggctttgaaatatgagaaaggctgattgctattttgtatgtgattagaactttccacctttttcgtggttgcatctttttctcagtgtctcagttgtggcagttggtgcattctgaattcaccacctcttttgcatagagaactggcttcccacaggctcccagcaggggtatgaaagctagcccagttttgtgtgactgttttattctgaagtgtgaatggctggaggactccctgtcagccttgcagaaatgctcttagaactgcactgcaggccgggcgcggtggctgacgcctgtaatcccagaactttgggaggctgaggcgggtggatcacgaggtcaggagttcaagaccagcctggccaagatggtgaaaccctatctctactaaaaatacaaaatttagctgggtgcggtggcaggtgcctataatcccagctacttgagaggctgaggcaggagaatcgcttgaacccggggggcagaggtttcagtgagccgagatcacactactgcactcaagcctgggcaacagagtgagactctgtctcaaaaaacaaacaaacaaaaactgcacttcaatctaaaacttccttcctctctttctcttccacaggaatcagatctgcatcatggtctgaggttcctctcactctcgccttactttccctcacaggcattttccccaataaattatctcgtatgtttaatcccatcttcactgtatctcagtagatggaaactaacataccaggcttgagactttgctttacctccttttttccccctttcccatatttgatcatagccatgtcccagtgggtttcttgtataatgcttctccctccatatatatatatatatatatatataatatataaataataccttttgcatctatttcttcttcttctttttttttttttttttttttgaggcaggttctcactctatcacccaggctggagtgcagtggcacaatcatggctcattgtagcctcttgggatcaagtgatcctcccacctcagtctcctcagtagctgagactataagcacatgccaccacacctggctaatttttttctttcttttttttttttttgagaccgagttttgctcttgttgcctaggctagagtgcaatggcgtgatctcggctcactgcaacctctgcctcccaggttcaagcgattctcctacctcagcctcctgaattgctgggattacaggcatgcgccaccacgcctggctaattttgtatttttagtagagacggggtttctccatcctggtcaggctggtcttgaactcccgacctcaggtgacccgcctgcctcaacctcccaaagtgttgggattacaggcgtgagccaccacgcccacccacctggctaattaaaaaaaaataatttttgtagagatagggttccactatattgcctaggctggtcttggattcctgggctcaagagatcctccagcctcggcctcccaaatgttgggattacaggtgtgagccactgtgtctagcctatttcttgtttatatctgttgcaactatttggggcttaaccctcaccagtcaactcaggctggtgactaatgctatgttagctacttttgtggagtacttcctgtgtgccaggccctgtgctgctaaatgctttacatgtatcttatttgatccataaaatagtgctgtcaggtagacattatttccattttaaacatgaaaaaatggaagcttagagtggtaaaaggcttacctaaagtcagatggctagtgagaggtggatctgagatttgaccctaggactacctgatttcaaggctaatgataatagtagtagtaatagcagctaacatttatgaaacatttcctctgtgtgtggtgttttgctgaaggtttattattacattaaatctttaaaataacactatggggccaggcgtggtggctcacacctgtaatctcagcactttgggaaacagatgggaggattgcttgagcccaggagttcgagtccagcctgggtaacatggtgagattctgtctctctgaaaacaaaaataaaaataaattagccagatgtggtagtatgtactacttaggaggctaaggtgagggaattgcttgagcccaggaggttgaggctgcagtgagctgtgtttgcaccactgcactccagtctgggtgacagagtgacaccctgtctcaaaaacaaaacaaaaaccccaaacccgtgcaatactatggagcaggcattcacagtgcaattttcggttgaggaatccgaggctcagagtagttaagaatcttgtgcaagaaagaaatttataactgtaggccaggtacagtggtgtatgactgtaatcccagcaatttgggaggctgaggcaggtgtatcacttgagctcaggaatttgagaccagctgggcaagatggtgaaaccctgtctctacaaaaaattacaaaaattagccggaggtggtagtgcttgtctgtagtttcagctacccaggaggctgaagcaggaggattgcttgaacccgggaagttgaggctgtggtgagccatgatcagcctcggtgacagagtgagaacctgtctcaaaccgaaaaaaaaaagttgttcttcaaaaaagatcactataattgacaactgttaattagattgactaagaaagaaagaagattcaaattactaaagtcagaaatgaaagtaaaacattactactaattctgcagaaataataaggattataagagtactatgagtaattgaatgccaacaaattggataacctggatgaaatgaacaaattcctagaaacacaaaacctgccatgatagaatcatgaataaatagaaaatctgaatagacctataaccagtaatgaaaatgagtcgataaaagcatttgacaaaattcaacattctttcatgctaaaaaacactgaaactaggaatagaaggaaattctcaacataataaatgctacatgtgaaaacccccagctaccatcatagtcaatggtgaaagattgaaaacttttcctttaagatcaagaacaagacaaggatgcctgcttttgccatttctattcaatgtagtattggaagacctagacagaacaattaggcaagaaaaaaaaagcatctagattggaaagaagtaaaattatacctgtttgcagaatacactaacttatatatagaaaaccctagagattccacaaaaaaactgttagaataataaatttagcaaagtggcaggatacaaaatccacatgcaaaaatcagttgtatttttgtatactaataacaattcaaaggaaaattaagaaaaaaattctatttataagagctttaaaaatacttagaaataaacttaaccaaagaggtgaaagatttgtaccctgaaaatacaaaacattgccaaaagaaattaaataagacataaattgaaaagacaccccattttcatggattagaagacttaatattgttaagatgacagtactacccaaagtgatctacagattcagtgcaatctctatcaaaattccagtaatattttttgcagaaatagaaaaattcattctaaaatttatatagactctgaagggaccatggatagccaaagcaatcttgaaaaagaacaaagttgaagggctcacacttcctggtttcaaaattttttacaaagctatggtaatcatcacacctgtaatcttagcactttgggaggtggaggcgggtggattgcttgagctcaggagtttgagaccagccttggcaacatggtgaaacgccatctctacaaagaaaagcaaaaaaacaaaacaaaacaaaaaaacccaaacaacaacaataaaacaaacaaacaaaatccaaaagctacagtaatcaaaacagtatggtactggcaaaaagaaatagaaaccagtggaataaaatatagagcccagaaagaaatgtttgcatacatagccaaatgttttttgacaagggtgccaagatcattcagtggggaaaggatagtcttttcaacaaatggcattgaagaaactggatatccatgcaaaagaatgaaattgaacctttatgtaacaccatatataaaaattaattcaaaatgcataaaagacctaaatgtaagagctaaaactataaagctcttggaagatagagtgaaaactttggaacattgaatttggcaatgatttcttggctatgacactaaaagcataggcaacgaaagaagaagtagagaaattggacttaatgaaaattaaaagcttttgtgtatcaaagcacattatcacaaaagtgaaaagacttcttatagaatgggagaaaatatttgagaatcatatatctgataagggattaatatccaaaatatataaagaactactgcaactcaaccaaaaatccccaaacaacctaattaaaacatgggcaaaggacttgaataaacatttctccaaagaagataaatggcaaataagcacatgaaaagatgctaaatattgctaatcattagggaagtgcaaatcaaaactccaatgatataccaccttataaccattaggatggccattataaaaaacaaaacaaaaccagaaagcaacaaatgtttttgaagatgtagagaaattggaactctagtgcattgctggtgggaatgtgaaatggtatagccactgtggaaaatggtatgatggttcttcaaaattaaacaggattaccatttgatccagcaattccacttctgagtatctatttaaaagaactgaaagcagggatttgaacagatatttgtatacccatgtttgtaatagcattattcataatagccaaaaggtggaagcaacctaactgtccatagatggatgagtggataagcaaaatgtgatgtatctatctacacagcataatattattcagtctccaaaaggaatgaaattctgatacattctacaacatagatggagcttgaagacattgtgctaaatgaagtaagccagacacaaaaggacaaatattgcatgcttccatctgtatgagaggtacttagaatagttaaatacggggtgggcagagtggctcattcctgtaatcccagcactttgggaggccgaggctgagaccaggagattgagaccagcctgggcaacacagtgaaaccccaactctacaaaaaaacttaaaaacttagccaggcatggtggtgcaacctgtagtcccagctactctggaggctgaggtggcaggattgcttgaacccaggggattgaggcgggagtgagctttgatcacaccacagcactccagcctgggtgacagagtgagaccctgtctcaaaacaacaaaacaaacaaaaaaacccaaccaaccaaaaaaaaccaactaagtatatgtatatttgattcagagcctgagctctttttttttttttttttttgagacagagtcttgctctgttgcctagactggagtgcagtggcaccatctcggctcactgaaagctccgcctcccaggttcacgccattctcccgcctcagcctcccgagtagctgggactacaggcgcccgccaccatgcccggctaatttttttttgtatttttagtagacacggggtttcaccatattagccaggatggtctcgatctcctgccctcgtgatccgcccgccttggcctcccaaactgctgggattacaggcgtgagccactgtgcccggcctgagctgagctcttaaccactttgcaattctgtttgctataatggtctcttcattgatattctgcctcctgtgagttttatccattttgcacaccattgacagagtaatcctagagggacatataggaaggggtgaggagtcacttacagtttacgttcagcatgatggggtcgctttggttcttactgattgggttgaagacctcacaccaatacgtcccagcatcctccctcttgacagggtttatgctgagggtggtgttgccctgggacagcttcatcctctccgaggacgggagactctggtttttgaagaaccaacggatggagattccagtgtcatttgtggagcaggtcaggttcacagagtccttatctcctgtgactgtggtcttgctggctttgatttggggctttgctactactggacttagctctgtggacaagcagagtatctgagataacctactgagaatagggttggggcctggggcctagggctatgctcctttccctgagattttagccagctctcaggtcccacagtgagctgtgcaaaggtcaccaaccaggggatagccctgaccctctgcagaaggtcgagtgtctttgttcaggtgatgaattgtaaggagagggctgcacctccctcctgaccccagatcgtctcagagtgaccctctggatatctctatatctccacttggaatcttcttctcagcgcacagaccgagcaacctcatcatcaggtagaatgtttttcccactgactttttttttttttttttcagacggagtctcgctctgtcacccaggccggaatgcagtggcatgatctcagctcactgcaagctctgcctcccgggttcaagccattctcctgcctcagcctcccgagtagctgggactaaaggcatgtgccaccatgcccagctaattttttgtatttttagtagagacggggtttcaccatgttagccaggatggtcttgatctcctgacctcatgatccacccgcctcagcctcccaaagtgctgggattacaggcgtgagccactgtgcctggcctcccactgaccctttcctggagctgtgatcaggcatccttcctgtgactgtcactttacatacaaaagggaaggtagtgttttttttcattaaataattttttagggaatgatgatgccccatccagtcttcatgaccttactatctggagttccaatccgaaggatttcccactgtaaagaggagttttacttcctggtctgtggatagaatatcacggtgaaggagattcctagagtaggcacagtgttaacaaaaggctgatattcttaccttctctacaaatacacgctgtttggcattgcccattctctccaatgcagagcccctgtggctgaatctcccgatttctccaagtgtgggtcactcgctgtgctctgtgctatcccatgtgctgtgcccacagcctcatacagctggtgacttcagagccaggacaagctcagggaggcagcctgacccaggggaggctcaggtgttgactgcctttatttatttatttatttagtttttgagacagagtctctctgtgttgtccaggctggagtgcagtggtgccatctcggctcattgcaacctctgcctcccaggttcaagtgattcttgtgcctcagcctccctagtggcatgcctagtggcatgtgcaaccatgcctggctaaatttttttttttgtatttttagtagagatggagttttgccatgttggtcaggctggtctcgaactcctgacctcaggtgatcctctcacctcggccttccaaagtactgggatcacaggcatgaaccacagcgcccagccattgactgccatcttgatttagctggattcatgacaggccacctggacaccttctgcacacacctgcgtcctaccccacatggggtcagggcagagccaatcaccgggcaagccgggagtagagcagggagcagagtctgagctgctcatccctgatgaagggcatttccttctctcatttagggaaaactattgtgagtctgttttaaaacctcacatattccttatatctcatggaataggtaaaagaaggccaagaagttacagaaagggacatgttagtgacagaagcaaattgaccttgaggaccctttctgcttccccctctgtgaagcccctcctgctacacggggctttctggggctgagagaaccccctccccacattccaggctggacctaaggtcagctgtgagaaatcagaaaaacaaagggaagagagtctgcacagatgaattgagagggttcaggggagaatttggacttgtttgtgcctgttggatacaggctgcaaaagaaaatttcttctctgctcctatttgaaaaccagaaagcttgtaccccagatcttagtgttgatgctccaggaattacttaccagtgactatgatcgtcttgactgtggtcctgttgcagccagtgactgagttattggcgtggcaggtataggatccactattattcacagtgatgttagggataaagagctcttgtgtgctttgctggaatgttccattgataagccaggagtactgtgcaggtgggttagaggctgcatagcaggagaggctgaggtttgcccctggacggtaataggtgtctgaaggggaaatggtgggggtgtccgggccatctggagcaaagagaataaagccacaggtgatgtcatcagagggaaggggaagctgctggtctggagaagggccacagtgttcctctctactaagtcacaaccctgaagtcctaaccaaacctccattgtgtccactgagtctgggtctgagacattcacctgtttctcccatcacaggctgtggaccctgagcctcccaggacaggagcagcctctcccctcctattcttggttcaggctggggctgcccaggtttgcctggggaaaggaagtcatggccagcctgggtgtccagggttaagggtctgcgtccttagacctgagagggactgagaggcctggcctctggctgcgtggatttgggctggcagcctgggccacagaggaacagaagatactcacaggtgacattcaaggtgactgggtcactgcggttcgcactcactgggttctgtatttcacactcatagggtcctgtgtcattccttgtgacactgagtagagtgagggtcctgttgccattggacagctgcagcctgggactgaccgggaggctctgattgtttatccaccacaggtaggttgtgtcctgagtctcaggttcacaggtgaaggccacagcatccttgtcctccacagggttggagttgttgctggagatggagggcttgggcagctccgctatgcagaaaacagagagaagattgccctgtgtggcacctttgattcctccacaggcatttttcttttcttatttatttattttttttggagatggagcctcgctctgtcacccaggctggagtgcaatggcacgatctcggctcactgcaacctccacctcctggattcaagcaattctcctgcctcagcttcctgagtagctgggattacaggcacatgccaccatgcctgacggggtttcaccgtgttgcccaggctggtctcaaactcctgagctctggcaatccgcccgattcggcctctcaaagtgctgggattacaggcctgagccaccgtgcctggctgggcatttttctttctttctttttttttttgagacagagtctcgctttgttgctgaggctggggtgcagtggcacgatcttggctcactgcaacctcttcctcccgggttcaagcgattctcctgcctcagcctcctgagtagctgggactacaggtgcatgccaccatgcccggctagttttttgtattttagccaggatggtcactgttagccaggatggtctcgacctcctgacctcgtgatctgcccgcctcggcctcccaaagtgctgggattccgtccgggcatttttcaatcagagttggcatctccccacctctcagccaacccaagtccctaaaagcccatggcaagtgtgtgtttcacaagacagatgtgcaatgatctgagggctcagagaccgtgaggccgcctgctctgtgtgagagaagcacagactttctcaagtgtgaactgagcagcagtgttgggtcgtggacagaccgaggactgggagtcacagccccaggcacttctggtccttccctgactggctgatgcctgcctgacccacctgtgggtcctcacctggaacatacaggtgctgggtcccttccagcttcacagtcctactttgccccactaggtgtgttttctctgcagcttccctgtctgaggacatcctagagatgggtgatgatgggacttcctattgtccttaaaccctgaggatactgagcagcctggcctgggactgtatgtttcagcagaaataacaggggacaccaggggcaagcctgaaggtagctcagtcgtcaggcagcagaaccacaaggtggggcagtttttcccaggtgtttgatgatgactgacttgagccagtgaccccctaaagatagagcagagtccaaggaatgatctagaaaagagtgagggtgacaggcaggggctgcctggatttaacagcatatctacgttccttgtctttggtctttaatgtcccttttccccctgaaaagagcagatgatgacactgtggatcttttctgaaatatgtgggttttttgcaaatgcagaataaccagctagtggaacggaaggagcatgaacttgctgaaagcctgaccctcatggaccgtgtgtgtttggtagatctgggatataaatttgagaagttaaattattccatttgtgaaaattgttattaatactctggatctaacaccaattaataagaggaatattctctagagagcgtgataaactcttaaaccaagctctgaagtccagtaggatcatgttatgatcaaagaaagatgctgaagtcagtttgaaatcagtgactccctgggtagaagggactcatgggtcctgttaggaagacagaacttgtcagaaaggatatctgagagttctcaattgcattaagagagaaacgatgccatatgaggagaagtgatgtatgttatgttagtaaatttagaaagagttctatgttacaaattcctgtggaaattcaggtaaaaagaggaacccaaaacagtcatgtgaaatgctttcttccttttctctcaacctcaggaaacacaactagagtttgaccaaattcatccaaattgggcagagtctaagtgagacaccagtggctaatgcatctccctgtctgagagatcccaccttatgacaatggtgtcatcatgaggacacaggtgtaggtggaatgggcagcaaacccatcagacagcacctgcctggctagctctacctggggaaggtcccaggaaccactagaggatgtgagcccacagcagaacagggatggagttaggagtcaaatgggtgaaatgagcccatgggctttggggactgcagacctgtccttctgcctctgatcccctggtgagtcagtatagagagtgtatggaggagtcgctcgtccctgtcccctggcctgttccacatgtcagcctcactgagggacgtggggacagtggcttatgatggacctggcaggggtggctgctctgggctcatttctgtgcctttcctattgcctgggaggtgggcctggccacagtgtgagcgggaagggaacaggacagtcaaccttgttagacggagtgtctgggaaaggcctaagggtggaggaaactgtgcagttcagctgggataaaaggagaggaaaatgaggacatggaggagcagagagagtcagagatgcccatgacagtgagcagtgggggctaagtgaccttagagaccccagcaaccaggagcctctggtgtcccagaaccaagaccagggagccctgaaaaccttcccacagccgagcagccccagagtcacatgaaatatggtacttggggtggctttaggggtagatggtcaggggatggaacatgggtctcagtctctggagggatggggagcaggtatggcaagaacctcccaggattctgcaaccagatccagtctctaaagaggttatggatcattcaatcattcattcattcgtgagagaactactgagtgtgtgtttcatattgggccctggctggtgcagggtgtgagtgaggagagaaagcaaagtcctttcctttatcctcctgtgggagtgacaccaacacatcaggaaacacaggatttcaagtccagggagcagaggtgtgggtctgaggggataggcctgaacattttttttttttttttttgagatagagtctcactctgtctcccaggctggagcacagtgacatgatcttggctcactgcaacctctgcctcctgggttcaagcgattctaccacctcagcatcccaagtagctgggattagaggcacgcaccaccatgcccgactaattttttttgtatttttagtagagatggggtttcaccatgttggccaggctggtcttgaactcctgacctcaagtgatccgcccaccttggcatcccaaagtgctgggattacaggtgtgagccaccacacctgacccaggcctgaacatttctgacactgactctaattgttgaataagttccagaataaaacttggttaattctccatttgatctcactccccagaccaggatctcccctctgggctgcagatgcctaagaagaaaggaactgaaccaactctggtattggggtccacagatgccaaataaggcccctggagtagaggagaggttaagactgtggctgaagacaaatctcctgtaactgatcttccagttacggtctgtgtgaccttgatatagtgactgtatttattgccatgtggctcagtttcccctcagtgaaatagtataaatggttaatggttttggcttatcttgtggtctgtgaattaaccttaaaatatttataattatttgacctcagctctgcataggggagctgcccaaataaacaatcttattttattttatttttttgagatggagtctcgctctgtcacccaggctagggtgcagtggtgtgatcttggctcactgcaacctctgcctcccaggttcaagcaattctcctgcctcagcctcctgagtagctgggattacaggcacgcaccaccatgcccggctaatttttttgtatttttagtagagacggcatttcaccatgttggtcaggctggtcttgaactcctgacctcatagtccatccacctcggcctcccaaagtactgggattacaggcgtgagccaccgctcccggccgcagcatctattgttgttggattccctgagagtgcctctcagcctgatccctggtggacaaggagctttcaggagcatcctgtctcctctgttcctcctcctggggatggtaaacttcctatggcatctcctaagcccccagggcagttggctgatggcctggggagcttgtccatctgtcctctccaggctgagactaaggtgaaggatgaggctccatccttgcccaaatgaggctctagtgcctgaaccctggctggttaccagctccaggagccacagccctcggatagctcaaattcttgttcctagtcagccctgcccaggaggccacaatctagccctggcccaggctcctcagggtcaccaggagttgagaaccttgggatagtgttttggagcaggggattcccagggctgagcttgtctgtgaggatcccagaaggcccttcaggccagaccctgactgagtcctactgggtctttcttagggacatgttcaccaggagggtcccggggggctagattgagactggtctcccctcgataagttacccacatcagattgtccttcctctgaagcaaatgtctgcaggatcaggactccagagtaagacattcggtattttgatgtctgtcccatagtgtgtcctgcactagatgctcaaaccttaacatggggtataatgcagaggaggacacaggcacagcccaggcctgacaatcccatgtgtgggaagtagaactaaccccccaacacccagaggtcatggggaaatactcacggtatacatggaactgtccagttgcttcttcattcacaagatctgactttatgacttgtagggtgtagaatcctgtgtcattctgggtgacgttctggatcagcagggatgcattggggtatattgtctctcgaccgctgtttgcgggccctggggtagcttgttgagttcctattgcatatcctacaatttgacggttgccatccactctttcccctttgtaccagctgtagccaaaaagttgctggggcagattgtggacaaggagaagaacctccttcccctctgcaacattgaatggcatggattcagtagtgagctgggcagtggtgggcgggttccagaaggttagaagtgaggctaggagagaggagagagcatcagtcaatattgggacctatgcattagggtagaaaaatggggccttgggtcctgagcaggtgtcttcacccctccaccttggagtgtgtgtgtgtgtgtgtgtgtgtgtgtgtgtgtgtgtgtgtgtcctactgggtcaaggtcagcagtgtgactcccattcccttagtgcctctgaccttgtcatttctctggaatgcccttccccagggatccgcatggctccctccccactgccctcagatcttgatcacatcagggtgctcttgggagatcctttccctgacacctcccctagagaccctgggtattccctttctgacctttttctgctctgttccctccagggctcttgtcaacacctgacctcacattctagatctctttgcttgtctgtcttccccacccatgagagcgtgagctccgtgagggcagggatttgtgtgatgttggttgcaccccagtgcctgggataggctgcagactcctgtggatgagttagtgagcattcccagggctcttcatgtcctggggtttatttgccaatatctgaggttggtggctcagggctctgtttaatgccccttttaaaatgttttccttaattgtcacgctgacttaaattgtgattattgtcagcagtttttgaaatttattgctcattgatgattcagttggaaaaggtaaaaaatgggagattgtttattcactaacagtttcagatcactgagactttccttttatgatctctatccctttcatgtcctctctcctatttggctccaagagaagccctctgtcccctcttagagctccatcctccccagaggaccctagccattctctgtgcgccctctttccgccccttcccagggtgtcctcccctcacctgtgagcagaagcccctgccagggtacacgcactctgtgaagtggggctgagaggtgccccatggtgtctcctgctggccctgtcttcacctgtggaggagagcttgggctccaggaacgcttcgagcacggctgctctgtcacctctgctgttttccactctctgtgctgagcctcctccctggggcccagagctttgtctgatcatgtgtgctggggcggggtttgtccaggaagctctgtttcctctcctctcattcctacctttgtccttactttctctttcctttctgtctacattttggtttcccagaccacactttgagaatcaaggctgatgagacctctgtccccatcaggggaggaggatcccccctctccagcactgacctctattgtgtcctggctatgggtctgtcagcagcacacagagaaccctggcatatccaaatgtggtaattattttctttgcaacacagtgagctgccaggtctccccatgctcttcagtgtgctgggaaggtaggaagacacccagcaggaaggtgacagaggtggctctgggggatggaaaggggctcactgggggatgactggggagggaccagccctctgtctctagtgtcaccagcctggcctctaacccagggacagagacccaagtccaggggtctcaggtggagctgcagctcccggatatggagggggaggtgtcctgtgtgtcctgggaagagaggactgtgatagagggaggtgggtggctctgggctctactgtccttggggaagacttcagggggaccctccctcccttgagctgaggctcaaggcctgtccatgttctccctgaccatcctgggtggtctctgtcctctgcgaggctgattgtcctgtggtcaccgcaccttccccacaggtggtgccaggagggaatggggagctgcacagggacccctcacagaacagggtcctcagaggacccaggaagggacagagcaggtacatgggagggcctggaagggtgttttggagcaagggatggaaagtgggctctaccttcacctccttagcaaagccaggttcatgaccaggggaatgtttcctgagtgttgtctgtgtgcaatgtctccccctggagggcaagacaaggcctgcagccttgtcaagggctgccccagggatgctgaccagggtctacatgatgtgagctggccctgacccctgggcagatgtgggctctgacctccaggcttcaaggtcaagtcaccccaggtcctgttcactgcgggtccccaggctgcccagctccatgcggtgcaggatgagcccagggagaggacgtgagttgtccagaggacttctgtcaagattggagagaactgtccaccagggggatgggctgccttagaaggagccatctgtcccagaggtttgaaaaacaaaagcaaaaacaaaacaaaacaaaaaaacaaaggcccagtgaggtgcctttgggggcttgagaatgaaatcctgtcacatgtggcaacatgaatggaagtgggctaggaacagaaagttaaacatcacatgttcttactaatatgtggaacctaaaaacagttgatctcatggaaggaaaaagtagaacagagcataccagaggctgggaagggtagaggaagggagggacagggaaagatgtgttaaaggatataaaattacagctagataggccgggcacagtggctcatgcctgtaatcccagcactttgggaggccgaggcgggtggatcatgaggtcaagagattgagaccatcctggccaacatggtgaaaccccgtctctactaaaaatacaaaaaattagccaggtgtggtcgtgggcacctgtagtcccagctacttggaggctgaggcaggagaatcactggaacccgggaggcagaggttgcaatgagccaagattgcaccattgcacttcagtgtggcgacagagtgagactccatcttaaaaaaaaataaggccaggcgcggtggctcacgcctgtaatcccagcactttgggaggccgaggcgggtggatcatgaggtcaggagatcgagaccatcctggctaacaaggtgaaaccccgtctctactaaaaatacaaaaaattagccgggcgcggtggcgggcgcctgtagtcccagctactcgggaggctgaggcaggagaatggcgtgaacctgggaagcggagcttgcagtgagccgagattgcgccactgcagtccgcagtccggcctgggcgacagagcgagactccgtctcaaaaaaaaaaaaaaaaaaaaatacagctagataggaggaggaataagttctaatgttctataccactgtaggatgactacagatttttttttttttttgagacagggtctggagtacactgcagcctcaacctcctgcgatcaggtgatcttcctgcctcagtctcccatgtagctggaactataggtgcacgccaccacgcctggctaattttttgttttatttttcaatttttttttaaataaagagacagggtatcactatgttgcccaggctggccttgaactcctaagctcaagtgatcctccgcctaggcctcccaaagttctaggattacagccaccatgcccagccaagtgttttgatttttttgtagagactgatcttattatgttggtcaggctggtctcgagctcctgggctcaagcaatcctcccgtctcggccttccaaagtgctaagattataggtgtgacccactgcaaccggcctgactatagttaacaataatatatagttccaagtagctagaaaggggatattgaatgttcctaacacaaagaaatgctaaatgtttgagatgatggatatgctaatcaccctgaccttatcactgtaccttatatgtatcacatcgctatggacccataaatatgtacaattattaggtgtcaattaaaaaatacaattaaaaaagtcatttagagctaaatcatgatgtgaaatgttgttttcttacctctcatctcatgacaacacttggcaatggcaaaacatcctcaggagttgtggctgtgtgctttactgcacagaccagtttgtttgtgagaatgtgtcacctaatgcgagtgaacctacatgagatcatcacccttcctgggggacctcagagaagaactgagaaccgctggctcaggtgtgtggaggaggttgcaggtgagtcacttgctggaaggaaggtctgtgggccagcttgaggaggaatccatttgtagaggccactggatggggccacctgggcctgggtgaagagggcctgagggcacaggacagggggagagagaaggtggtgcacatcgtcatgcaggcaagtgctttaagtgtctcttcattcattcatggcaggcaactcacactttaacatagcaactcagcaaataaaatgaggatattgactgggcgcggtggctcatgcctgtaatcccagcactttgggaggctgaggtgggtggatcacctgaggtcaggagttcaagaccagcctggccaacatggtgaaaccccgtctctactaaaaatacaaagattagctgggcgtggtggtggacacctgtaatcccatctactctggaggctgaggcaggagaatcgcttgaacccaggaggcggaggttgcagtgaaccaagactgcgccattgcattccagcctgggtgactagagcgaaactctgtcttaaaaaaaagaaaaaaaaatattttttctacttagttcaagttcctaaaaaggtctccagattgccagatttccctggaagcaggtcagggaatggtccccattaagaactattgaaatacattaacaaaaaataaagacagatagaatagctgaaacagtcttgaaaaagaaaactggaggactcacatttctttctttcttctttttttttttgagatggagtttcactcttgttgcccaggctggagtgcaatggcacgatctcagctcaccgcaacctccgcctcccgggttcaagcggttctcctgcctcagctcccgagtagctggaattacagacatgcaccaacatgcccggctaattttttgtatttttagtagagacggggtttcttcatgttagtcaggctgatctcgaactcccgacctcaggtgatctgcctgcctcagcctcccaaagttctgggattacaggcgtgagccaccgcgcctggccaggactcacatttccttatccgaaaacttactatatggtgggtacagtgtgccttgctccagtgacgaatgcactgaaggccttgactttaccacaatgcaatatatcagaatagcaaaattggacttgtaccctatgattatgcacattttttaaaaaagaaaatttactacaaagttactgtaatctgaagagtgtggaactggcataaagatacacttacaccagtggattagatttgacagtctggaagtaaaccctcacatttacagtcagttgatctttgacaagggtgctgtggttttttaggtgtcaatttgcctggattaagagacaccctcatagctggtaaagccttgtatctgggtatgactgtcagggtgtttcccgaagagactggcattggagtcagtgaactcagtaaggaagacctgccctcactcactgtgggtgggcaccatccacttggctgagggcctggatagagcacaaaggcagagggatggtgaattctctctttctctctcctggagctgggacacccttttccttttgtctttggacattagaactccaggttgtttggcctttggccatggactgagggtacaccatggcttctttggtcagaactgagccatgctgccagcttccctggttttccagcatgtaactggctaatcatgggacttctcagcctccgtattcacacaagccaattcctctaacaaatcccctcatatatttagatctatttctatatctacaactatatctttatcccgttttctctgtctctctgaggaccccgactagtacaggtgccaagttaattgaatggaggaagaataatcttttcaaataatgatgctgggacaactggataaccacctgcaaagaaatgaaattttggaactctatttctcaccatattcaaaaattaaaacagatcaatgagttaagtataagagctaaaatcataagaaactctcagaagaaaacataaggataagtctttatcacctcagatgtggcaatggactttttagatatgacacaaaaacatgaacaacaaaaggaaaaataaactggactttatcaagatgaaagccttttgtgcatcaaaggacattatcaagaaagtgaaaagatcacccaccgaatgggagaaaaaatttgcagaccattatatgaataaggttttatgtccagaaaatataaagaactgctacaactcaataataacaaaaacccaaaaacctgattaaaaatgggcaaaggggctggatgcggtggctcacgcctgtaatcccagcactttgggaggctgaggcgggcagatcacgaggtcaggagttcaagaccatcctggcttacacggtgaaaccctgtctctactaaaaatacaaaaaattagccgggcgtggtggcaggcgcctgtagtcccagctatttgggaggctgaggcaagagaatggggtgaacccaggaggcggagcttgcagtgagccaagattgtgccactgcactccagcctgggcaacagagtgagactcgatctcaacaacaacaacaaaaatgggcaaaggactcagatggatatttgtctaaatgatatacaaatagtcaataagcacatgaaaagacacttagcatcaatagtcactagtgaaatgcaaatcaaaaccacagtaagacaccacatcacacctataacaattgctacaattcatttaaaatgttaaataagaaatgttggcaatatgtggagaagttggaatcctcatacattgctggtgggaatataaaatggcacagtcactgtgggaaacggtttggcttttccttaaaaagctgatcacagaattatcatatgaaatagcaatttcattgttaggtatatgtccaaagaattgaaaacagggactcaaacagatatttgcatgggaatgttcactgcagcattattcacaataggtaaagtgtagaaacaacccaagtgtccatcaacacatgaatggataaacaaatatggtgatacatacaacagaatgtcaatcagccttaaaatggagtgaagctctgacatatgctgcaacatagatggaccttggaaacattatgctaagtgaaataagccagaaacaaagtgacatatgtgtatgatgccatttatatgaaaaatcaagaataagtaaattcagagacagaaagtagattagagattatcaagatctgggggtagggagcaatggggaattatttttttttaatctttaatttttgtggttacatagtaggtgtatatatatatatatgaggtacatgagacattttagtacaggcatgcactgtataataataatatcatggaaaattgggtatccatcccctcaagcatttatcctttgtgttacaaacaatccaattgcattcttttagttactttaaaatgtataattaaattattgttgactataatccccttgtgctattgaatagtaggtcttattcattctttctatttttttatatccattaactatatacccacctctcccctgtcccgccactacccttcctagtttctgggaaccatccttctcttctttatctccatgagttcaattgttttgatttttagatcccacaaataagtgagaacatgtgatgtttttcttcctgttcctggtttcacttaatatgatgacccttagctccatccatatcgttgcaaatgatagaatctcattttttaatggctgaataatactctattgtgtataagtgccaccttttcttcattcattcatctgttgatggacacttaggttacgtccaaatcttggctgttgtgaacagctctgcaacaaacatgggagtacagatatctctttgatatactgattttctttcttttgggtatatacccagcagtaggattgctggattgtatggtagttctatttttagttttatgaagaatctccaaacagttcttcattgtggttgtactaatttacattcccaccaacagtgtacaagggttccctttactccatatccttgctagcatttttaattgcctgtcttttgaataaaagctattttaactggggcaagataatatctcattgtagttttgatttgcatttctctgatgatcaatgatgttcagcaccttttcatatgcctgtgtgttattcgtatgttttcttttgagaaagtctgttcagatattttgcccttcttttaattggattattagatttttttccatagagttgtttgagctccttatatattctcattattagcatttctcgttctttaagatgcatcgttaggttttaggttatttatttgaagttcttctctttcttttttgatgtaggcacttagggctataaatttccatcttggtactgctttcattgtatcccacaggttttggtatgttgtgttttcattatcatttgttttgagaaattttccaatttccttcttaatttctttgttgacccactggccgtttaggagtatatcgtttaatttccatgtgtttgtatagtttccaaaatacctcttgtttttgatttctagttttattccattgtagtcagggaagatacttgatattacttcaatttttttgaatgttttaagacttgttttgtgacctaatatatagcctatttttgagaatgatccatgtactgaggagaagaatgtgtattttgcagccattgaatgaaatgttctatagttccatttgttctatagttcagattaagtctgatgtttctttgttgattttctgtctgggagatctgtctaatgctgaaagtgaggcgttgaagtctccagctattatggtattggggtctatttctctaatatttgatttatatatttgggtgctccagttttgggtgcatatatgtttacaattgttatatcctcttgctgaattgacccttttatcattgtataatgacctcctttgtcccttctaacagtttttgtctttcagtctattttgtctgatataagtatagctactcctactctcttattggtttccgttggcatggaatatctttttccatccctttaatttcagtctatgtgtatctttatggttgaaatgtgtttcttgcaggcaacagataattgggtcttatttttcagccgttcagccatactgtatctttttttggagaatttagtccatttacattcaatgttattactgataagtagggacttactcctgtcattttgttatttgtttttctgtttttatttattgcagtcttctctttcttctttccttccttcctgtcttccttttagtgaaggtgatttcctctggtggtatactttaatttctagctttttattttttgtgcgtctgttgtatggtttttgatttgtggttactatgaggcttgcaaatactatcttaaaaccattattttaaactgatgacaacttaacactgattacataaacaaacaaacatgcaaaaagaaaactaataaaagctctacacttcaacttcgtcaccccactttttaatgttttgttgtttctgtttatgtcgtattgtactgtctgtgtcctgaaaagttaatgtagtcgtgatttttgattggttcatcatttagtctttctacataagagaagtttatacaccacaattacagtgttatactattctgtgtgcttaactattaccagtgagttttgtacctttacgtgatttcttcttcatcattaacatcctttcctttcaggttaaaggattaaatttagcatttctcataggacaggtctggtgttgatgaaatccctcagcttttgcttgggaaggtctttatttctccttcgtgtttgaaggatatttttgcctgatatactattctagggtaaaagttgttttccttcagcactttaaatatgccatacactctctcctggcctgtaaggtttccactgaaaagtctgctgccagatgtattggagctccattgtatgttgtttcttttctcttgctgcttttaggatcctttgatctttgatcttagggagtttgattgttaaacgccttgaggtagtcttctttgtgttaaatctgcttggtgttctataaccttcttgtatttgaatgttgatatctttctctagggttgggaagttctcttatattattcctttgaataaaccttatgtgcctatctttttctctacctcctctttaaggccaataactttttttttttttttcctggagatggagtcttgctctgtcaccaggctggagtgcagtggcacagtctcagctcactgcaagctccgcctcccaggttcacgccattctcctgcctcagcctcctgagtagctgggactacaggcacctgccaccacgcctggctaatttttttgtattttttaatagagacggggtttcaccgtattagccaggatggtctccatctcctgacctcgtgatccacccgcctaggcctcccaaagtgctgggattacaggcgtgagccaccgtgcctggcctaaggccaataactcttagatttgccattttgagcctattttctagatcttatagatatgcttcttttttttttttttttgtctcctctgtgttttcaaatagcctgtcttcaagctcacaaattcttctgcttgatcaattctgctattaagagactctgttgcattcttcaacatgtcaattgcatttttcaactctagaatttctgcttgaatctttttaattattttaatctctttgttaacattttaattttatttattttatagagacaaggtctcattctgttgcccaggctggtctcaaactcctgagttgaagtgatcctctggcctctgtctcccaaagtgttaggattacagacacgagccactgtgcccagcctctttgttaaatttatctgataggattctgaattccttctctgtgtcgtcttgaatttgagtttcctcaaaacaattattttgaattctctgtctgaaaggtcacatatttctctttctccaggattggttcctggtgtcttatttagcttgtttagtgaggtcgtgttttcatggatggtgttgatgcttataggtgtttgttggtgtctggtcactgaaaagttaggtatttattgtagtcttcatgtcatagtctgggcttgtttatgcctgtctttcttgggaaggctttccaggtatttgaaggcacttgggtcccaagcccaagaatgctgtggtttttgcagacttacataggtactgccttggcgatcttggataagatctggaagaattatctggattaccaggtagagactcttgttcttttcccttaatttgtttcaaacaaatggaatctctccgtttgtgcagagccacctggaactgggagtgtggtgatgcaagcactctgtggccaccaccactgggattgtgctgggtcagacctaagcaccgcactgggtcttgcccaaggcccttcccttgagggtggtgaggtctcccaagcctcagatgtgtctagaaatgctgtctgggaggcagggattggagtcaaaaactgtggctgattagccaggcatggttgtgggtgcctgtaatcccagctactcaggaagctgaggcaggagaatcgcttgaacctgggaggcagaggttgcagtgatcagagatcatgccattgcactccagcctaggcgacaagaatgagactccattgcaacaaacaaatgaataaacaaactgtggctaatctggcactcaaacaatgcaaagtccttcctgctcttccttcccctttctccagcaccaccactgttccacaggggattccacccgtcctctgctgatgttcacttaaagcccaggggttcttccatcagcttgtggtgaatgctgccaggcctgggactcactcttcagggcagtgggctcccctctggcccagggaaggtccagaaatgttctccaggaacataggcctggactcggggaccccaagagactgctggttactctatcccactgtggctgagctggtacctgaggcacaagacaaagtcccctttactttttcctctatttttctcaagtagaaggagtctctccccatggctaccacagctgggaatgcactgggtcacccctgaagccagcatgtctcagagcccaaggcccactgcatattacctgggtatcactactggttattcagggcccaggggctctttagtcagcaggtgatgagttctgccaggattgggtcctttccttcaaggcagtgggctcccttttggctcacggtgtgtctagagatgtcatctgggagctagggcctagaataagggcctcatgactctgcccagttccctgtcctgctgtggctgagctggtatccaagatgcaagacaaaatcctctttactcttctctcttctctccttaagcagaaggagggagtcactttcgttgcctctagctgcgttgcctgaggttgggggaggggtggtgaaagcattcccttagccatgccagctggtgtctcccttggttacacgccactctagtccactggctttaagcccagcctaactaggagttgccttttaagtttacctaggactccagagcacatcagcccaccgtggggaggcttgctgaaaaactgaagttccgactgctgggatgggtgatacctgtctggctagggctggtccaagtactgcctctctgtgtgggcactggctgagcccagcatgcctttattctttgctgtgatggggcagcactgaattcaatgtaaggtcctccagtggccgcactcacccttcccaaagtgcagattctctctccatgttgcagggctgctgcgggttggtgggggatgggtgaggggtggtgtggcctctctccggccctcttcagtgccttttttctttctttttgtaagacagagccttgctctgtcgcccaggctggagtgtagtggtgcaatctcagcttactgcagcctctgcctcctgggttcaagtgattctgatgcctcagcctctcgagtagctgggattatgaaagtgcgccaccacacctggctaatttttgtattttttttttttttttttttttgaggcggagtctcactctgttgcccaggctggagtgcagtggtgcaatctcggctcactacaacctccgcctcctgggttcaagcgattcttctgcctcagcctcccgagtagctgggactacagccacgtgccaccatgcccggctaatttttgtatttttaatagagatggggtttcaccatgttgcccagggtggtctcaaattcctgaccttgtgatccacccgcctcagccttccaaagtgctgggattacaggtgtgagccactgcgcccggcctaatttttgtatttttagtagagatggggtctatgtagcccaggctggtctcatgctcctgacctcaagtgatccacctgccttggcctcccacagtgctgggattacaggcatgagccactgcacctggcccaatgcctctttcagcgatatgaagttaaaaccaggtactgtgattgctcccctggttttggttcttgtgacagtgcttttctctgtgcagattaaaatgtagtgttccagtggtgtgggggtgaggggacaaatggtgtaggcgtctattctactgtctggctgtttggggtgatgaaaattttctggaaaaattagtgatgatggtggtttaacattgtgaatatagttaattccacttgtgtatttagagacagggtctcaccatgttgcccagactagactccaactcctggcctcaagcaatcctccctcctcagcctcctgagtagctggggctacaggagccctccatcagggctctgtagtaaattccatttaattgtacagtttaaaatggttaaaagatacattttttgatatgtatattttattacagttttaaataagtatttggtgaaaaaaaccccaccatataaaatacccaccctgggcaaatagtcctcaaactcatgtgcggacccctcatgacattctgtgcagagatccaatgatttagacatgagactgaccagacaactgcagatgcatgaaataaatgtactttcaaagagacagttccgctgggacctgtgggccccgcagaggggaggtcagcagccccctggaaaggccctaggctggggccctctggtggacagtgaggaaattgtagacgaaaaggtcatgccaaactggtttgtttaaaaaaaatcatcgtttgtttttaatgtgtctagacaaaatttcaacactgtcatgttccatatattttctttcgcagtgttctttgattctagctcttctctggtgtgtgtgtgtgtgttttttttttttttgagacggagtctcgctgtcgcccaggttgcagtgtagtggcgcgatctcggctcactgcaggctccgccccccggggttcacgccattctcctgcctcagcctcccgagtagtagctgggactacaggcgcccgccacctcacccggctaattttttgtatttttagtagagacggggtttcaccgtgttagccagcatggtctcgatctcctgacctcgtgatccgcccgcctcggccacccaaagtgctgggattacaggcgtgagccaccgcgcccagcctctctggtgttttaaaacaagcttacactaaactcagatgttcaaagtctgatgccctgccactttcttacttcagtgcatgtttctttttcgagacggagtctcgctctgtcgcccaggctggagtgcagtggttctatctcggctcctgcaacctccgcctcctgggttccagcgattttcctgcctcagcctcctgagtagctgggattacaggtgggtgccaccacacccagctaatttttgtatttttagtagagatggggtttcaccatgttagccagggtggtctcgaactcaggtgatccacctgtctccacctcccaaagttctgggattataggcgtgagccactgcgcccggcctcagtgcacgtttcttataattccttttaaaatctgaccattgtcatgggcatgcatcaagtctgtgaatgcagacctctgggatatgcccagtgggaatactggggactcagggaatagttatcacccaaggtaggatggcatgaggcagtatcaagggacacctgcaggggggtgggggttgtgtcccacagatggtgggagccacagatggtttcatcaggacagaggcacaataaccgcatcttgatggtctcagggcttagactcacctgttgcgtccagaaccaggcattgaccagggttcaaattagtgctccacctgcagagccctgggcagagatggacaacagcctccccctgcaggacagtcagtgcagggctgggtcacctcagcactccacaggcctttgcctgcagtgttctcctggccagggaggaggccaggcccatccctgtcacatcatctaaggggctgtctgccctgagggtctgcagaagagttgaacagagtaaggggcataggaagcagtagagccgtgtctcttcttgagctgtgttaacttttgtcttcttagtccctgaggtcactcccaaatgtgggcatctagacctgaggcaggagggtaggacggggccagcttcttggcatgtgacctgtgttatcacatgggggcctgtgcttagaagggtcctgcacttaatatagtgcccttctgtggctgtgttgaaaccctcttaatcctgtcttgaagaaggatactgcattttcaggttgcactgaatcccccacattatgtggctcttcctgggtcaggagcagggagagggagaggccatgagatgagggggaggctcagggctggatgggacccatgtcccctagggctctgtgctgcccttgtcttaggacctgcagggcggtttggtctcatctgttcactcccagtgtccactgaatggtgcttgtatagcagggactgtcccactatccaggacaagcctatagtgtgtgtgctcactcagtatgtgtgtcaggctggacagaacctcactttatccctgtctgctgtgggatctgcagcaaggatcccctcctgggagtctcggtgtctctgtacctgagtggtgggatgaggagacctcaaagggccatctcagaggggactcaacagtgttggggctggaggaggcctgggctctggggcccgaggatgtcacacacctcttgagtcttttgaaatggtttcatctgttattttgaaaatcatataggtggctgggcatagtggctcacgcctgtaatcccagcactttgggaggccgaggcgggtggatcatgaggtcaggagattgagaccatcctggttaacatggtgaaaccccatctctattaaaattacaaaaaattagccaggtatggtggcaggcgcctgtagtcccagctactcaggaggctgaggcaggagaatggcgtgaactccggaggtggagcttgcagtgagctgagatcacaccactgcactccagcctgggcaacagagggagactccatctcaaaaaaaaacaaaaaacaaacaaaaaaaaaacggtcacataagaaagcacacttattgtaaattccagcaatataagcgcttgtaaaatgatgtgtcagatccctgaccccaccccactccaattccatttccaggatgtaaccactgtttgcagttggtatgaatctttcaataatactttctcatttgtcccactcattgtttatacagccaaacattaatgaattatattattaattggtaatgttgttttatagtgaagcatgtatggtggacacttcctttctcaacacatgtggatttgctccaattgtgtttctttttctgttttagaggttttattttaggttcaggggtacatgtacaggtttattatatacataaactgcatgtcacaggggtttggtgtacagatgattttgttacccaggtattaagcctagtacccaacaggtgttttgtctgatcctctccctcctcccaccctccaccctcaagtaggccccagtgtttgttcttctctttgtgtccatgggttccaatcatttaggtcccacttaaaagtgagaacatgcggctgggcatggtggcttacgcctgtaatcccagcactttgggaggctggggggggggcggggggtggatcacgaggtcaggagttcgagaccagcctgcccagtatggtgaaaccccgtctctactaaaaatgcaaaaatgagaacatgtgatatttggttttctgttcctctgttagtttgctaaggataatggcctccagctccatccatgtttctgcaaaggaaatgacctcattcttttttgtagctgtgtagtattccatggtgtgtacgtaccacattttctttatccagtctaccattgatggacatttatgttgattccatgtctttgctattgtgaatggtgctgcaatgaacattcgtgtgcatgtgtccttatggtagaatgatttatattcctctgggtgtatacccagtaatggggttgcagggtcaaatggtacttttgtttttagctctttgaggaattgccatactgcttttcacaatcgctaaactaatttacattctcaccaacagtgtataaacgttccattttctctctctcttttttcttttttagacagtcttgctttgttgcccaggctggagtgtagtggcacagcctcagctctctgcaaactccacctcctgggttcaagtgattcttgtgcctcagcctcctaagtagctgggactacaggcgtgcaccaccacgcctggctaatttttgtattcttagtagagtcgaggtttcatcctgttgggcaggctgctcttgaactcctggcctcaagtggtcctccctccttggcttcccaaattgctgggattacaggtgtaagccaccgtgcccagcacattcctttttctctgcaacttcagcagcatctgttattttttgactttttaataatagccactctggtgtgaaacggtatcttactgtggttttgatttgcatttctctaataattagtgatgttgagcattttttcatatgcatgttggtccatatgttcaagcttttgaaaagcatctgttgatgttctttgccttttcattgctttccccttatttattttattgcatggctacactgtgatgctttatccactcgcctattggatttgacgctgtgtcccactcttcatgttgacaagacattctgcagtgactatcctcatacacatatcttttccccacgtggagtattaatccaggaactcattcattcagctcttataaagtaccctggccaggctgtgggcaggtcaagggctttaacagagacagggcaggcacagtcctgccttctcagagctcaccgctcagtgggactctcagaagtgggatagtggtcaaagcgtatgcacactgaacacaatgaggccagggctgggtgtgatggctgagttcaaacctgcaattccagagctttgggaggccaaggcaggaggttgcttgaagctaggagttgaaggctgcagtgagctatgatcatgccactgtactcctgcctaggcaacagagcgagactccatctcaaaaacctccacaagacctaaaaaatcatgggccaaagttgttgttgtaagtactgcagtcccatcaggaatatatgaaaatgtccatctccagtatccccacctttcttggaataatgattgaagtagaaagtgcccgtgttcttgtgcctacctctgcccacacaccgtcttcacttacacttagtcatccaccacttaccctttcactaagtgctattgattatgtccatgtggtggaccagatgccaggagccccaagatgtcctgagcagctccctctgctcgtccttccaagagttctggttccacaggtgacccctgtagaacctgtgattaccactgaaggctgacagtgagtggtgggtgttccaggaggggccgtcacctccatgtacagggttggggagggtggaagggagcaagtggctgatggctttggctgtaaggcaggtggacaggctgatgtgggctcctgggaagggatggagaggggaggggaggggaggggaggagagggaaggggagggaagagaagggaatgatacagaggttggaacctgccttcatggaccaagaacagcagggaggccatccaggctgcagctggggagggaagatgtggggagtagtgggtgaagggagaagcagactgtgattgatcttgggggctgggcggtgagcagaggtgtgttacgtgtctgtccctgccattgatatgaggaggggtggggctgtgggtgacacctgggtcagtgggatttcctagtgtctgctgttccccaaagcctctccatatagagggtcagtatagatctgatgctgtgtctgggggaaggggctggtggtccgaggcagcctgtggtgcttactgaccctagggatgaaaggaaagggatgaggaagcctctttacagtgaagcctcaggtatgtgaagccacaggtgtctcacctggtgactgtcatcagacatgtgccttgggtgacagtttcagggttcaggtggttgttattgttatgatgtttgcctgacaaggacccaggtatccagggatcgagagcacaagacccctggtgaggggagggtcagatgagaatgagcaggttcaagtggtcagagtgggagggattcctggagagactgaacctcaactcttcctgtcaggagctgtggctgtgtccaggagagatgacaagggtgacccaggacattgagtgagtcatcgagacattggatatgaggacagggcagagaggaccctggtgactgctcagatgtgggatgtgaggagggctctgactcatgcaagttacaggatcccccaacccctgagcccacaggtgacccttacactggggattctgagtgctgtgtgtgcccagaagggacactggattggctggacctgagtccctgaagggcagggatggtctgtagggccagagtcttctctgtgggtgtgatgtaagcaggaatgagcaagatgggggtgataaggcttggcttggaggagctggtagaggagcccaggggcttgggtcagctccgcttcccaggggctcagctggggctggaggagcaggatgctgtgctcagggtgtgctccaggcagggtgatgtgtgtggttccagggtcaggcaagagggtaaaaaattaatcatgaaaaattcccaccttttgtaggcagagacagtggcctgagtgtcaggggcagaaagatgcatcatgaggcaggagcaggcactcagcctcccagagaccacaccctgggtgcagcactcagccctgcagggagtggcaacagatgtgcctacaaccctaacgtccaggcacctgcaacaaatgtttctccctcattgcatctttctcatgtggaatagaatgggcagtgatatggtttggctgtgtccccacccaaatctcatcttgaattgtaattcccgtaatccctacatgttgtgggagggacctggtgagaggtaattgaatcatgggagtcgttcccccatgctagtctaatgatagtaagttctcatgagatctgatggttttataaagagcctccccctttggttggctctcattcttctcattgatgctgccatttgaaggacatgtttgcttccccttctgccatgactgtaagtttcctgaggccttcccagccatgctgaaggtgagtcaattaaacctatttcctttttagattacccagtctccagcagttctttatagcagcttcggaacggactaatacaggcagcttttcccgcagtctctttccatccatgtgctgcctgctgtgatgcctgggaatggggggggggggggggcgggcactgagtcactgtccagggtgctgatgtccatgaactgttgaagagctaatgagttgtgatctcccagttacttctgctttcatttattcttaacaactgagcatgtcaccaaggaaaagatagagaggtactaggggcatggagagccctctgtctctctctctcaggacctggagggtgctggggacatcactacagtcaggatgacctcatccaggtacccatgtatagtttgtagtgaatgatgatgagaaaatggccttgagaggagtgatgggcagaacaagaacctctcaaagatgtgctcatcctcatccccatatctgtgaataagtctcatggtaaaagacactttacagattaaaggaaagatcatgagatggggagtgataaggcttggctgtgtccccacccaaatctcatcttgaattcctatgtattgtgggaggggcctggcgggaggtaattgaatcatgggggcaagtctttcccatgctgttcttgtgatagtgagtgggtctcagaagatctgataggtttataagggggagtttccctgtacaaactctctttttgcctgctgccatccatgtaagacatgacttgctcctccttcccttctgccatgattttgaggcctccccagccatgtggaactgtaagtccattaaacctctttcttttgtaaattgcccagtctcaggtatgtctttatcagcagcatgaaaacagactaatatagtaaattggtaccaatagagtggggtgctgctgaaaagataccccaaaatgtggaagcaactttggaactgggtaacaggcaggggttggaacagtttggaggggtcagaaaaagacaggaaaatatgggaaagtttggaacctcctagagacttgttgaatagctttgcccaaaatgccgatagcaatatggacaataaagtccagactgaggtggtctcagatggaagtgaggaacttgttaggaactggagcaaaggtgactcttgttttgttttagcaaagagactggtggcattttgccccagccctagagatttgtggaactttgagcttgtaagagatgatttagggtatctgggggaagaaatttctttttctttttttttttttttttttgagacagagtttcactcttattgcctaggctggcatgcaatggtacgatcttggctcactgcaacctccgcctcctgggttcaagtgattctcctgcctcagcctcccgagtagctgggattacaggcatgcaccaccacacctggctaattttgtatttttagtagagatggggtttctccatgttggtcaggctggtcttgaactcctaaccttaggtgatctggccacctcggccacccaaagtgttgggattacaggcatgagccaccacacccagccttctggtggaagaaatttctaagcagtgaagcattcaagaaatgacttgggtgctgttaaaggcattcagttttataagggaagtggagcataaacatttggaaaatttgcagcctgacaatgcagtagaaaagaaaatcccattttctgaggagaaattcaagctggctgcagaaatttgcataagtaatgaggagccaaatgttaatccccaagacaatggggaaaatatcttcagggcacgtcagagttcttcacagcagcccctcccatcacaggcccagaggcttaggaggaaaaagtttcatgggttgggcccaaggtctctgtgttgtgtgcagtgtagagacttggtgccctgcatcccatctgctctagctgtggctgaaaggggccaacatagagcttgggccatgacttcagagggcgcacgccccaagccttggcagcttgcatgtggtgttgagcctatgggtgcacagaagtcaagaattggggtttcagaacctccgcctagatttcagaagaggtatggaaacgcctggatgctcagacaggagtttgctgcaggggcagggccctcatggagaacctcttctagggcagtgcagaagagaaatgtggggttggagcccccacacagagtccctactggggcaccacctagtggcactgcgagaagagggccaccgtcctccagatcccagaatggtatatccactgacagcttgtaccatgtgcctggaaaagctgcagacactcaatgccagcccatgaaagtagccaggagggaggctgtatcttgcaaagccacaggggcggagctgcccaagaccataggaacccccctcttgcatcagcatgacctggatgtgagacatggaatcaaaggagatcattttggagctttaagatttgactgccccactggatttcagactagcatggagcctatggcccattcgttttggccaatttctcccatttggaatggctgtatttacctaatgtgtgtgccccccttgtatctaggaagtaactaacttgcttttgattttgcaggttcataggcagaagggacttgccttgtctcggatgagactttgggctgtggacttttgagttaatgctgaaatgagttaagactttgggggactgtttggaaggcatgattggttttgaaatgtgaggacatgagatttgggaggggccagggtggaataatatggtttggctctgtccccacccaaatctcattttgaattaccacatgttgtgggaggtaattgaatcatgggggcaggtctttcccatgctgttcttgtgatggtgagtgggtcttatgagatctgatggttttataagggggagcttccctgaacaagctctctctttttgcctgctgccatccatgtaagacatgacttggtcctccaccttctgccatgattgtgaggcctccccagccatgtggaactgtaagtccattaaacctatttcttttgtaaattgcccagtctcaggtgtgtctttagcagcagcatgaaaatggactaatacagggagattattgtggtttatccaagatgtgtccaaaataaccacaaggcccctttcttataagtaagagagggaggcaggtgtgggtggagatgtggagacagaagcagaggacagagtggtttcaagatgctgcactgctgtctctgaagatggagaaaaaggacacaaccaaagatgtaggcaccctctaggaggtggaaaaggagaagaagcggactctgacctggagcttccagaaagcacacagccatgagggcgccttggttcatgtttttatgtcactcagcttgtggtaatttgtcatagcatcaacaagaaactaaaaaggtgtcacctttcctcatctgacggtgtgtgcaggtgggataaggggtcatttagagttaaatcctgatgcaaatcctgaggtaaatcaacccattaccagttgttttcttacctctcatctcatgatgaacagcctgtggcagtggcagaacacccttgggaaccatggctctgtgctttagtgcagggactggcttgtttgtcggaaggtgctgcccggtccaagtgaacctacatgagattgtcacccttccaggggccctcagggaagggctgagaaccgctggcccaggtgtgtggaggagctgcaggtgaggcagggctggaggggccaggtagaggagcagacaggttgtcctgtcaccatgggagcctgcatgagctttaggttggggagccctgctcctctgacctggatgctcctgtgtggaaaggaggcttgctcaatgagatccacgccagggggtaaattgggaactgatgggaaatgaggggctagagtcctgggtaatgccttggaggaccttgctcgaggactgaatttttggtctgtccccaccttgattactctgacagcccctctctgtgtcccaccaggggtaaaaatgtcctgagcagtggccactgggacagaggagaacctggtggccagggctaagcatccaggatcctggatttggggacaggcaaactcacttgtggaggacagtgatagacagggccgccagggcctgggtgaagagggcaggagggctcaggacactggaggctgtgtgggggtcacagccacgatctataccacccatgtatgctcctgcattgctcacctttgtgtggacatcagatggccccatcttccacgctcctgagaccccacatgcattcacagaggaacccaggctggggcagtgcatggccttggtccctggggtagtgggaagacagctgagtgcttggctggctgggcagggctcctgtgaatcctgccctttcctgtgtagggtccaccccagcctgactcccaaccccctactcctgtctcccaggaaagagagactggggttgagaaaaggtggagatattttccctgtgtgagctgggagagaatggacgtggagtttcaggtgagtttctgctaagttctcacgagcagaaaaagagccaatgagaggaaggttcccctttattcagatcctttccaggtgaccccgggtgggccacaggcccattcactttccctgcaagcccccacttcctgtggtgatgggaagcctttgtcctgacccacccagagcccagggcagtctgttgaggtctccatatattcagcagggactcccatccctccctgtccccaggccagtgtctcctcaggactcagagctggttctctggctcaggctccatgtccttccccatccccagggctgggagcttcggggacgctccaacaacccacaggagcagctcccagaggaacctaagaaaccacatctgctttgtggttgacccagcagtaaatgtttgtgtcatggtttagcaattcctgcaaaaaaaaaaaaaaaaaaaaaaaaagagaagaggccttgacccctgtggctttctgagaacagagtctggtgtctcccaggctctgggcccatccagggctgctctgatgctgaacctggctgtgctcagggggttcctgttcccaggccccttcctcatctgctcaccaccccctgttgtgtttgcagtttcctgaatctcagagctcagccaggtgtgggtgggggcagatcctgggtccccctggagcctgcgggaccagaacacctgtgacccacactcacctcatagatgggagcggctgtcctggggtcgggtagcggggcctgggcaggggagagaggggatgtcaggggacagagagggagagacatggaaggttcctgtctctgatcggccagaacttacttccctgggtctacttatggtcatttcccctcaggagtgaccagctctgcccttgagctcagcctcccagtgtggacacagcaccccgacccctgtcctggctgggcccaccctgcacccttgttaatgtgggcccctgactgattcttccagtgtccactctgcacctgctgcactccaggggtctcctcaggtgacggagggccccggggtggggtcagcacagggcatgggtggtcctggccatgtagggaggcctggatcctggccggaggcactcactttgacctgactgttctggggaaaggtgggtttgtgctatgctgtggggttgatggtccccctgccctgaacctgtactgctgggaccccagtagaaaggggctggggaggggatgggcttacagggtaggtggagttgtttgagggaccatggcctgggggacacagacaggagtcagcagctgggtgggaggagagcctgggcctctcatggaggagggcattggggtcctgaactcccagagagtcagggagacagggcatcttaccaggagagacccctctagccattttaggggccaagtgagcaagtgagtttgcagaggtgacccatgaccaagagcccacaggtcagggctgacctggccagttggggtcccctgcaatgacgttttatgagactcctccttgaagccccatggaaaggatcagaggacctcaggggtgactggcaggagtggacactgtgggccaggcctaggggttgccagccacacccaggctgaagggacactggggagctgctctctaaagtcatgctggccactggccctaggagaggtcaggcttatttgtgaggagtacaagattaaaagccaaactctggagttagaacaggggatgaagaggggaccctatttccaaagaggggcatggagatctcctttctccattggttctgtatcaggagctgagccaggtgaggggatcaaagactttacaaaggcacatctgtcctggccagaggggaaggaccctcagccagatgctgggccaggagaacattgacccagggatgcaggaaaggaactgagggcccagggaaggaaccagatcatgggggtttgcctgagaggaagggttaagtccccagagggaaagcagggccaggcacatgtgcaggacactgaggggaccaaaggtgtcttggattctcccagaactcagtgtccctgctgtggccagaccctgctctcagggccagtgatgctgaaatgggacaacagccttgtcttctctctctaccccttggcaagagacataaaggacattccaggacatgccatcctggcacccaggttctcttgtctcacagctcaggggctgcgggaactgcattagccatgggggcactgaccctacccagcctgtccaagctgttacatccttcaccgtgtgaccatgcccaggactccctctcagatcctgagcctgcaaatcccccctcacttggtggatggattcaataaacagcaggaggtaccggggttactgagcactccctcccccgctcccttcctccaggcagctgtggctttgctgtgtgagggaactaggaccacactcaggggtgagaccttaaccaggccgaattcacagaggaggaagctgttgaggaggcagcccagggtcagcagctggtgagggaggagctgtagaatgagagggaaggatctcttggggagggctcaaagagcctggccctgaatactggggggggtcttcttcctcctggcctggggtcagcctgggggtgggagggaggccaggaaaaagctgtagtaccttccagtcctgacgaggagcaggaaacatgccagggtggccaccggtgccaccccgaccagaaccctggtcacgatgccagtgaaggcccccacaggaaggcctggggcatttttttctgcagaaaggggaaggcaaaggggatgaagcccaagtctgttccagggggaaccatgaggggccttgcagggcaggggcttgttcagggaggaaggaaatgccacggagtttgagtgtggtctgttgtgctgtcctcatagctgactccctcgctctctgtggctgcaccattttctgtgtctcaggcttgaaacactgggatgcgccgactcctacgttctcccccaggagcctgcacctcgccctgctcctgtgcctttaaatcccttcttcctctcacttcatgcctcttaccgcttttttcttttctattttttgttttttgaaacggagtctcgctctatcgccagactggagtgcagttgtgtgatctcggctcactgcaacctccacttcccaggttaaagcgattcttctgcctcagccttctgagtaactgggatcacaggcgttcaccaccacccccagctaattttttgtattttaagcagagacggggtttcaccatgttggccaggatggtctcgatctcttgacctcttgatccacccacctcggcctcctaaagtgctaagattacaggtgtgagccaccgcacctggccttttcttcttttgtttttttagatggagtctcgtccaggctggagtagagtggcacgatctcagctcactgcaacctccatctcccgagttcagatggttctcctgtctcagcctccctcgtaactgggattacaggaatgtgccatcatgccaggctaatttttgtatttttagtagagacggagtttcaccatgttggccaggctggtctcaaactcctgacctcaggtgatccatctgcctcagcctcccaaagtgctgggattacaggcgtgagccacagcacccagtcttccctctgtttcttcttttccattccatgattgtcatacagagctagccctcgctgtcaactcaatgctgatgagcggggatgatgctctttgactgttttcgggggtcttccatgtgccaggcacagtgggcaccaacctacctacagctcatctcatcctcctatcaccttgagggaggggggcttcactcccatctgcagagttagaatctgagacttacagtgcctcagtaagtcaaggaaggtcacagaacttgtacatgatacaaccaaattttaaccaaggtctccttgacttagctaataacaaagctcataaaaataataatactagttgatagcactgattgagccctggctctgtgcactaccctgttaagggctttaattacattaatcttcaaataaacatcctcacaaccatcctgagatccaagtgtttgttaaaattctacagatgaggaaactgaggcctaggaggttgagtgtcttgcccaaggtcaaacacctggtatattcccggcactgactgtcaggcctctgagcccacgctaagccatcataacctgtgacctgcacgtatacatccagatggcctggagcaactgaagaaccacaaaagaagtgaaacagccaattcctgccttaactgatgacagtccaccgttgtgatttgttcctgccgcaccctaactaatcaattgaccttgtgacattcccccccggacaatgaatctcatgatctctccaccgtgcaccttgtgacccgccccctgcccacaagagataactacctttaactgtaattttccactacctacccaaatcctgtaaaactgtcccacccccatctccctttgctgactcctttttcagattcagcccacttgcacccaagtgaataaacagcctcgttgctcacacaaagcctgtttggtggtctcttcacacggacgtgcgtaacactgaccctgatagttgacacaagggatttagttccagataaaaactggtgaattctcctattgttcctcactcctcagatcagaatctccccctctgcactgtggatgcccaagatgaagggagatgaacccatgactggtctcaggtctgcagatgcctaataacaagcagcctcacacaaccccagtggaggagaggagggggctgtggctgcagacagacctcgcatgactctaatctgccacctatggactgtgttgttataggagttattaggaaattattttagggagatagagaggaaagggggtccttgggaagtttttctttttctttttttgagacggagtcttgctctgttgcccaggctggagtgcagtggcatggtctcggctcactgcaacctccgcctcccaggttcaagtgattctcctgcctcagcctccccagtagctgggattacaggcacgcaccaccatgcccggctaatttttgtgtgtttagtagagatggagtttcaccatgttgcccaggctggcctccaactcctgacctcaggtgatccacccacctcagcctcccaaagtgctgggattacaggcatgagccactgcttggccagtttttgtttcttttaaagcagttccagaaatgttgcttgtctagcagaaaagccccagctcttagagcctggctggcaagctttgatatacaaatgaaggccattagaaactgggtccacccaaacatggggattcctgccctcttcttgcccttgctcccatatgtgcctggcaacacggttgccctcacatatccccacgtgtgtagaaccatcaaggctccctgcatttgcatattaaaaggccagggtggagggccagtttcttcttgggctacgtgaatgacatggctggtcaaaccaatcccctgagccctgtgcaaatcagacaccacgtcctccggcctcctcatataactggctgttttctgctgcacttagggtttcctctctttgcttggaacccccctccgtctgtccctgtatgggggagctttttccttcttttttgcctattaaactctttgctccacatgtgtctgtgttgttttatctaaattggcacaagaccgaggatcctggtattgctccagtcatcagagccatatcagtgtgaccctagtcagtgactgtctccctgtgcctcattttcctttcaataaataagataaatgctatttggctacaaggttgtttatgaattaacctcaaaatgtttacaattacttgatctcagctctgcacagagcagctgcccagatgaacagcatgtatgtatttgaaatgcttgttccccagtgctgtaaagaaatagcacttgaacataaatttaattttctcagcaaggccatttttatattttctgtagaaagggtatactcgccagcaattttgtgacaagagtacaccgaacaaaggagacagggtcatttataatctgacgtgtctaccttactgctgtgtccggtttccactggctggaacaggatgtcacattttgtatttgtcccgattggctagcaacttagaactttttaaaagaggcaaaggcagaggagaacaaaggaaggaggaagtaacttgtggaatgctgagaaaggtaaaaaccatcttcaaataaagaagaggagcaggctatgacctaatgcttgcttggaccagtataagcatgccagggcaaatatttaggctaaattgtgggagctaagaacataaaatacatttttttttttttttttttattacagctagcagatatttaagaatgttagcacacgtctttgagtaaattttgcttctaagagaggttgctatttattcctaattagacagggaggaaagtctttgaagaggaacctctactttactttttacatatgcttatttgcctgtaagagaaagggccctgggcctgatttcaggtggagaaggagctgctgggagcatcctctatttgttcctccccctagggaccctgaacttacaagggagtcacctaagtcccccagggcaatgggctcatgccctagtaatcttgtccatctgtgctctacatgctgagtctcaggtgaatgttgaggctctgtctttgcccagatgagggcctgggggctgagccctggctagtgaccagctccaggagccactgcccttggacagctggtaaattgtggctcccggtcagcccaggaggcaacaatccagctctggcataggctcctcagggctccacaggattccacagacccctcagtccagaccctgacttagttctccagggtcttctcaaggtcatgtccatagggagggcatggggtgcttggctgagactgacctccccctgctgagtcccccccatcagactgtctttcctcagcagtgaatgcctgcagggtctggatacgggaaaggaattctgatctgttgaagtttgtctaccctgtatgtgtcctgcagtaaatgttcaaaccccaacatgggacgtaatacagaaggggacacaggcacagcccaggcctgacaatcccatgtatgtgaagtagaactgacccccaacagtcagaggctgtgggagaatcactcagtatacatggaactggccagatacttcttctttctcagggtttatctttatggcgtgtagggtgtagaatcctgtgtcctgggtgacattctgaatcagcagggatgcattggggtatattgtcccttgaatgctgtgggcaggccctgggggtagttattagagttcctattacatatcctgtaatatggtggttggcctccaccctttcccctttgtaccagttatagccaataagatcatggggcagattgtgagtgagtagaagaacctccttcccctttgtggcattggacagcatggcttcaacagtgagcatggcagtagtgggtgggttccagaaagttaaaactgaggctaaggtgggggagagaacatcagtcaatattgggacctatgtatttggatggaaagatggggccctgagttctgaggaggtctcttcaccccctagccctggagagagagagagagagagagcacgtgcacgtgcacgtgcatgcatgggtcctgctgagtcaaagtcagcagcatgacccccattccctcagcacctctgaccttggcacttccaagtttggaatcctcttccccaggagtctgcacaaacccccaccccttatcgccctcagatcctgctcacatcaggacatccttgggagacccttcccctgacacctcctctagagacccttgctcttctcttctctttctgacctttcccagctctgttccctccagggctcttgtcagcacctgacctcacattctagatctctttgggtgtctgtcttcctcccatgagagcgtgagctccgtgagggtggggacttttgtgatcttggttgcaccccagtgtctgggacaggctgcagactcctgtggatgagttcatgagtgttcccagggccctccatggcctgaggtttgtgggtaaggacagtgtttagtggccctggttctgtttttttctggagtgttaccctgacataacattttattgtcatcagttttcagaatttattgatcagtgatgattcacttgcagtatattaacagtggagattgtttctccattaacagcttcagatcattgagattttcctggtgtgacccctgtccctctctggtgtcctctcctctgaggctccaacagaagccctctgtcccccctcagagtcccatcctccccaggagatcccagtcagtctctgtgctccctcctcccacccactcccaaggagtcctcccctcacctgtgagaaggaacccctgccaggggatgcgccctctgcagggagggctgagggaagagcttgagctccaggaacgctcttgtcagggctgctgtgactgtcagctctgctgtccttcctccctgtgtgctgagcctcctcccagggcaggagcacttcccagggtcatgggtgggggtgggctctgcccaggaagcctctctgccccctcccctctcagtcctgccttcttgtccattcttcttttttccgttctgtcttcatttacattccccagactatgctttgagaagcaaggtttatttggacccctgtcccttaacaggacaaatcaccctccccagcactgatctctgctgtgtcttggccttgggtctgtcaacaccacacagagagtccctggggtccccgaacctggtttgttgtctctatgacaaagaaatccctcggtgtattcagggtcttcttagtgttcttaaatgtctgggaaggttggatttcctcccagcaaggaggtcacaaagatgtctggggtcctaggaatggacacatctggggctaaagcccaggtctaagagtcttacttgttctttctgcagcgctatgtggccctaatttcctgggagtaactgagaatgaagctgcacgttgctgtagtattatgtcatccagacctcagacatttctagatcacctttatgattttctctacagcttgttccacatttattatttacttcatactatttttctttttttgagatgggattttgctcttgttgcccaggctggagtgcaatggtgcgatctgagctcaatgcgcaacctctgcctcccaggttcaagcgattctcctgcctcagcctcccgagtagctgggattacaggcatgcgacaccatacccagctaattttttgtatttttagtagagacggggtttcactatgttggccaggctggtcttgaactcctgacttcaagtgatctgcccaccttggcctcccagagtgctgggattacagacatgagccaccgtggccagcccatactatttttttctaaataaatttagtttacaaaacatctttgtttatcagggcacagtggctcacacctgtgatcccagctactcgagtggctgaggtggaaggattgcttgaggccaggagttggagacaaaacatccttgtcttatgcagtattgtccatgaaattacagatttgatgtgtgcttaaatgtttttctaacatgcattaaaataaacacatgagtattaaaattaaaaaacagcttatttaactttcacctaaaatcagttttgggaaacgctgatacagtggcataagcatgcactttatatccagatagacctggggtcaattactggctccatcacttaactatgtcaacttggacacgtcacttggcttctgtgatccttgattccctgatttgtaaaaggaggatggtaaaatccaccttgcagagttgttgggaataagtgagctgctgtgggagccccgtgcccaggcagttgttgagtacatgatggttatcattgtggttattgctgtgggattctggttattttccagagagagtgtctatgctggaatattgggcttgtggctttctggtaatgtacatgtgtgataagttactttttcgcttgttaggacttgtggtgcatctgtcattattttcatgtcacagttttactatctatttgctctgcgattttggtcaagttgtgtaacttttctgtgcctcatttacctaatttctaaaatgtgggtaacagtaaactagtgtgagtgtgtatttcccagatctgaccactagagagcacagaagcaccagcaccttctaaccgtgggcctatcagtgccgatggcctgcaaacatcgttctcccatgaaaggaaccagggctccctggagaaatagctgattccagggctgggtcaggaaagcatagaggaacctggagctccttgtggggccagaaaataaggaactgcacgaaaaatggtggggatgtgtcaaaaggtcacagatttccaaggaactctcaatggtcaattttgggacaatatgaacaacataataaataatgatagtaatggattccagttcataaatacccatgaatccatgctgatataaataaataattgaataaattaaataaatgaggaagcagaaatagctttttcttgtagcagaattccagttaataaatgtagaaggagtggtggaaatggaaaatcactatttggctcacaacacaggaattgttatttataggcaaggatcatcatggaatatgaagaggcctggaatgaggcaggagtgagaacaggtggcgtgattttgtttccctgagaggagggaagaggcaagccatgagtcaaagccctttgatttttgtttgacagttcttctctctgtgttttcaaattatcccagcctgttgccttgtcacagagttggttgtgggctttgctactgcaggggttataaagcacgtgcaggggccagggactgtgctaggcagtggagcctgtgtgtgaattgaagggtcaggcagggcctaagcgtggtctgatgcaaaccactgatgtgacttctttcttgaaaattctaaaaataatctctgccttcaggagcctcaagtctaatgagggagatgacatccactttataaagcctagagatatgagtgcagtaatctctcaaagtggcagaagtgcatgggggactccgagttgggtggaacttgagctggcctcacagggcagggtaggatttgggttggtggagggcagagagaacggctgtgtggagcaggggtgtgttgtaggagaggcactctttggagctctttgtatggagatcattgagggtaggggctgtttgtgttcatttttgtattccctgaactcatagagcctggcactttgggagtattctataattgactgttgaatggaatgatcgtttcgtaacctgttaactgggcctgatgtgttagaaaatatgtaaaagtgcagcctgtgtattagaaaatgtgtgaaagtacagcctatgagcagaaagaaaatcttactgaaaagcgatcccacgtacacatggagcctggtgcggccgctttacttatgctgctgagttctgcatcagtccacaccgaggccaccacaggggccgggagctcctcctcagaccttcctctgggtccctcaatctctttacccccctgttctcccaggtcctgctccctgtcagttcactccatctggtttcccctccatgcacttggggtgggtatcacatcctgtgtctcatcacagggggctttgggtccctcagatccattgattaaaacacctctaaaacaaatggactttcctcttgttaacatgacaacttcttataatgcatttcaagaacattatttgtgtcaagagtctctctgatgtacagaggccctccctcccccaggaaggaggtcaggggaagttaggagaaaacagtgtcctgtctgggttgcttatttccctattctgcagtgtatttggtagacgttcaaaaatatttgttgactctgtccatgatccacatggctctcatatagtcatttattcacacacacattcagtgaggctttgagcgcctagtgtgtgcctggtatttgctagatggtggatgctgagaagatcagatgtgctgctgtctctgaggagctttcactatatagctgcacctagggtgaccgaatgcacctgccccactttacagacatggaaattaaagtgcaggcaagtcataggactagttcaatgtcacaaggtcactagcctcaaagttataggagtaaatcaagttttctgacttgctggattttctgttagtgtgcagccacctggctgctgcaggtgcagacatggtgagctccgataggagcgaggacgctcagagtgaagtgggagccctgagcaccctggattaaccaggaggacatgccgggtccagctatgactgcacagaggaccatcgggaacatttgaattctctttttcactttgagcttgaaatgaagaaaactgatcccagaaaaccaagcgtggaaggtatttcacagggcattggtgagatgggtcagaaaatcctgtgttgatgtctgtcatcatgtttgtcactgaatagtaatggtctgactttgagtgggttccatctgtagcctggagctctgtgaggcagggaccaggtgtgattcacctttgtctctccagtgacagtacacagcagactccgataagtattttttttttttttttttttgagacagagtctcactctgatgcccaggctggagtgtagtggtatgatctcggctcactgcaagctctgcctccagggttcacgccattctcctgcctcagcctcccgagtagctgggattacaggcgcctgccaccatgcctggctaatgttttttttttaatgtttttagtagagaaggggtttcaccgtgttagccaggatggtctcgatctcctgacctcgtgatccgcccgcctcggcctcccaaattgctgggattacaggcgtgagccaccacgccccgccctccgataaatatttcttacaaaataaaacagaataaaaagtagacatctgcacaggtgtgggatgactgagcagcagcagaagcaggaaaagtcagcgtccccagatcagctgatgtggcatttggcttctagataggggtgaggtgccaggacagggacgggggtcctggggctctgctgctctggggaacacccctaggatttggagtgtctgctgtggttgctgcacttcacttgaccatgggaaagtgaccagagggtgtggggcttcaggtgaccctatatgggaaatggccgagggaagattgggtgggtggtgcatgggatggtttacccgtatttgaaggtcagttgtatgaaaagatgttaaacttatttcagcctatggagagtaagatgaggattggtgagtgtgaatcagacaccttttgactcaagacaaaaaagaactgttacagtaaaggaagtttccttggaaaattacaagtttactggcagaattcaagccagggctgggtgtctgaaaatacctctcagaatgatttttaagctaacaagggcagagcttggctaggaatgtggttttccactgatatcacatattaaaaaaatgtcctttgcaatgggacattgctcaatgatgcaggctgagctctctatgacagttactttcagtcatgtgggcagctgtgattctcttatccagtccgtgacttggacttcaccaactacctctggcaggctgcccctgccagccctatcccctcttttaccccaggagttaagtgcattaactaatgatggccacaaggtggcagtgctgctgctgctgcttttttttttcttttttctttttctgagacggagtctcactctgttgcccaggctggagtgcagtagtgcgatctcggctcactgcaacctctgcctcccgggttcaagcgattctcctgcctcagtctcccgagtagccacgtagctgggattacaggtgcgtgccaccacacccagctaattttttatatttttagtaaagacagggtttcaccgtgttagccaggatgatcttgatcttctgactttgcgatccgcccgcctcggcctctcaaagtgctaggattacagatgtgagccaccgcacccggccctctctggtgttttctaaaacctctacctgaatgtgggcaagcctaagaggcttttaggattaagaaaaggtcatgaatgaggtgaaaggtaaacttcattattatttttctcttgtgaggtgacatagttgagtgtgaaatagttgcattttagaactggaagacactggagagaagtgcttcacaaatcttaatgtgttcatggatcacctgaagatcttgattaaatacagattcggattcttttggtggggcctgagattctcaatttctaaggcgcttttggatgatgtcattgctgctggttggtggaccacactttgagtagcaaggcttgagggtcatttagagattaattctcattccatgtgatttatggctgaagagagaccaaactacagagagagaatataacttgccttccataactatgccctcactgcatgactttttgcatttaaacccagggcttcagcttctccgtccaattctcgtttcatgcatcacgtggcccctacactgttgttggtggcatctctttaccttaggaacccagaactccatttccaccacccactgatcttggctcaaggtttcactttgactgggtctgcccttcctcaaaaccttgaggggctcttctataatcacaagatcaagtttgaacctcggtgtctactgttcatgcctctacaacatgtgattccccctttagcaagcttacataacttccctgtttttttaactgactctttctgctctagctctccctgctccttcctgttccctacacatacttcgttcaggtccctcaatggtagtggtggttacatggtctctggtgttagactcaccgagtttctaatcccatacccaccaccgaccttggcaagttacttcccctttctgaggatgagcatcctcctctgaaataatttcatgtattgattgagagagtaaataaaataacatctgcaagcccactgtcattcctcggaccctctttaaaactagcatctacacagggtggggaacatcacacaccggggcctgtcgtggggtggagggaagggggagggatagcactaggagagatacctaatgtaaatgacgagtaaatggggtgcagcacaccaacatggcacatgtatacatatgtaacaaacctgcacattgtgcacatggaccctggaacttaaagtataattaaaaaaaaaaaaaccaaaaccaaaaaaaactagcatctacagtggtgcctgacacctggttccctggcttatgtttctccatgtctctgctttcctaaggctgaaccattcaaggcctaacctgaaccctgtctcttttgtgagcatttgtttctttctttcttttttcttttttgttttgttttgagacggagtctcactctgtcccccaggctggagtgcagtggcgcagtctcagcccactgtaacctccgcctcctgggttcaagctattctcctgcctcagcctcctgagtagctgggattacaggtgcatgccaccatgcacagctaattttttttttttgtattttagtagagatggggtttcaccatgttggtcaggatggtctcgaactcctgacctcaagtgatctgcccgcctcagcctcccaaagtgttaggactacaggcatgaaccaccacacccggccttatgagcatttctgacccaattgatcccacccttctataaattgtttcacccatgtattggcatttaattatgtcccagtgagaccccatagggaggctggaagggtgttggctgtgtgaaaactgaaggtgaattgagtgagctcctttcttactaccccctgagtgttagagctaccatctcttttttttttcagctattgccagcagcagttcctcctgcgccagctgcaccagaccctgggcaggcaagtgaataccttagggtttgttcctgtcagggtcactcctgcctctgggttttggtgaaactggcgttttcttttgcatcttatcaggtggcccctctgaggaggttattgatgatatccctttatggaaagcctaaggtaataactctaaggaagttgagcacagtattttctaacttaaacagcttggtggcaggagatgtgtacactttcctatttcataaaatttacaacagattcagaagagattaaggacaaaggaccaaatggggaggacaggtttgtttaagggaggtcatgtactttcaatctggagtctatcaattgttcattcaactctgtgtggaagtgtgcatctttgcatgtgtggtcgtatatttggatcacatgattcataattctgtccctgtcagtggcaattaggagttcatgttaggcttatgaggataaaatatatgggtgtgcactattactgaagccagggtttctgatatctggagagaaaataggccaggagggctggtcactttacttagtgccctgcctttctctctctctctctctctttctcttttgagacagagtctcactctgacacccaggctggagtgtagtggactatagctcacttcaacctccacctcctgggctcaagtgatcctcccatatcagcctccttgttagctgggaccacaagcacatgccatcatgcccagctaattttttgttttgtttatttgtttgtctgtttttgtagagatgggttttcaccatattgctcaggttggtctcgaacttctgggctccagtgatctagccattttggcctcttccaaatgctgggattacaagtgtgagccaccattcccggccctgccttctctttttattagacagcagtctactcactcatcatgttcccagtgaggggatttttaaccttctcattttcctaccaggggtccatgccaaagtccatatgtgtttaattgtgtctagaattggatgttctttttgaaaagagcagcccaaggaatggcttcttagctgatatccaggattctaatcttcattgtctaaactttgggtttccattcctggatactggttagagtaacttgtagggcatttaaaatgtaccaatgtctgtgctttccccaagtatgtctgactggattggtgcattgtgtgcccaggcattggttgtttaagaatgcttccaaggaaaacggtcattttattgtggaggaattttagcccagggctcaaagttaacatcccattaattagagatatcgacatcttagggcatcctaatataatggatggagaaggcacaaaatcgcctctttggttttcttgaccgaagtgtataacctcagtttaatcatgagaaaaaattagaaaaatttaaactgagggtaactacaaaataacaacgccaatacttttcaaaaatgttaaggtcatgaaggcaaaagaaattctgaggaactgtcccagattaaaggagactgagaggacaaaacaatgagatgcaatgtgtaattgtacattggaccctgttccagaaaaaggacattagagggaagataaagaggatttgaataaagtctgcagattcattcactgtatgatgtcagcgataatttattgattttaatgtttgcactgtggttatctaaaacaatgtttggggaagttgagtgaaaagtatatggggactgtatttttggaacatttttgaaagtctgaaattatttcaaaatgaaaagtttgaaaaaaaaaaggagaagaaatctagatatttctattaagttgccagacttgaagaccatttcccaagttatcttgcctaatattgtagagtaatcttcctggaaatgctgtttgtcacgtttgtgagcttctcagagctttccagtgacttctcttatctgtaggatgaagttcccattccttaggatgccactcagagccctcatagcccggccccaatctactcccttgatttacattgaaggacctgacccacattttactttctcatttccaaacattttctaagtcttttccctcttcatatcacacccttgcctgtcttctcagcctcctgagttgttctttgtcctaaaggcccatttcagaccctgtctcttcattgaagcctgtatatttatttctgttagaagcagtcatctttcctttctttgaattcttgcaggtacaatggtgtggagtgaaacatgagttttatttcattatattatattttagaaaaaaatcaatttattctgctcattaaaagtttttcttttaaaaaaatcttaaaattttcattggagaaggattagagattaaattgttgatgtttgaatttcgttgtggtttaaaaaaacttttattttaggttcagggtacatgtgcaactttgttatgtaggtgaacctgtgtcacaggggtttgatgtacaaattatttcatcacccagctactaggcctaatactcagtagttatgtttcctgctcctcttcttcctcccactctccaccctcttgtaggccccaatgtctgttgttcccctttttatgtccatgtgttctcatcatttagctcccacttattttttaattttaatttaatttaattttttttttttttgagacggagtctctctctgtcacccaggctggagtgcagtggtgcgatctccgctcactgcaagctctgcctcccaggttcacgccgttctcctgcctcagcctcctgaatagctgggactacaggtgcctgccaccatgcccagctaatttttttgtatttttagtagagacggggtttcactgtgttagccaggatggtctcaatctcttgacctcatgatccacccacctcagcctcccaaagtgttgggattacaggcgtgagccactgcgcccggccttagccccacttataagtgagaacatgcagtatttgtttttctgtttctgcgttagtttgctgagcataatgtcctctagctccaccaatgttcctgcaaaagagatgatcacattattttttatggctgcatagtattctgtggtgtatatgtaccacattttaaaaatgcagttttccattgagaggcatttcggttgattctatgtcttctctattgtgaacagtgctgcagtgaacattcatgtgcatgtgtctttatgatagaatgatttatattcctctgggtatatacccagtaatgagattgctgggtcaaatggtagttctgtttttagctctttgaggaattgccatactgctttccacaatgattgaactaataattgacactcccaccaacagtgtataagcacccccttttctccacaaccttgccagcatgttacttttttttgacatttttgataatagccattctgacgggtatgagatggtatctcactgtagttttgatttgcatttctctaatgatcagtgatagtgagctttctttcctatgctgttggccacatgtatgtcttcttttgaaaagtgtctgttcgccaggcagagtggctcacacctgtaatcctagcactttgggaggctgacgtgggtggatcacttgaggtcaggagttcaaaaccagcctggtcaatatggtgaaactctttctctactaaaaatacaaaaaaattagttgggtgtggtggtgggcacctgtaatcccagctacttgggaggctgaagcaggagaatttcttgaactcgggaggcggaggttgcagtgagccgagattgcaccactgcactaaaaaaaaaaaaatgtgttcatgtcctttgcccactttttagtgggaatttttttttcttgtaaatttgtttaagttccctgtagatgctggatattacattttagtcagatgcatagtttgcaaatatgttttcccactctgtaagttgtctgtttactctgttgatagtgtcttttgctggaagcatgagttttggattcagaaatatgagtctgagtcctagttccaccttttatcaggtgagataagggacaagttaattgatgtcttggaatagagggataatagtgcctatttaaagggtcattgtgagcattggatgaggtacaaacataaaggtccccagcaggtagcagattacttcctcttcattcctgtagctcagtggttccaaaggtattgcgggtggtgtgaactttcttatcaaaattttctatagatccttcaactaagatagccttgaactgaactgaatgcttaggactttaagaagttcaactgacgtttggatttttgtgaaaacaactcagtaaataagttatctatcaatagaggaatgtaacccaacagaggaagaagggaatgacaatgggattgtaaatgggagaaagctgtgatgccttccacacccatccctttgttctcagtcagacaatatcaaggaagtacaacttctaaaattatgtaaaggaaaataaacacctcaggactgccaaactcattacaccaaagggatacttcagcctggagattgagtcatgcaagaccaccattttttccccaaatgaacaactgttactttacaaccttgtgtcaaagcattgtacattagccagagccccaggagaagatgaaaaggccctaggcatatctggatgacctccctcacaaattgtttttttgctgtcctcgaaccacatttgaagtatatttgtggaacagactcttacaagtactcttaaatgttggcttctcataactgtggagctcatgtcactggactaggaaaaaaaacccaggactttagttaaaaaaaatgcattcatgatgattgctaacccaacatcaagcagaacaagagttaattacatgaggataaattgatacaggactaaaatgattttttcatgaccttttttttaaaaaaaaacattgctgactttttttatgttttgttctccagagtcaaaaaagctttttttttttttcttttgagctttttagcttacaacaaattgggtaaagtataattttgtgagctaaatttgaaagatttatctttctctctacccaatttctacaaaaataaactatttgtgcatattcttaatttatggcaatatagatatttgcataaattccataagaatttgttttcttttataacaggacacaattggagacattggttattttatagaggctttgagtgaaatggtatattttcagatatgaccagaatgctttgaggaattgagattgactttatagaactgacaaaaagcctcttggacagactgacctggttaccttgtctatgcagtttctataaaaagttaatgatctgtggtaagtaaagaatgtcactttctgataggcccaggaacccccaagttattttgagacctcaagaaaagaggaattcaccaaattcatgcaggtatctacaggcacagataaattactggcttgcatagccttgagatgcttttggaagtctaatctgagattccttatgaaaaaaagtctcagcaaagccaatttaaaaagactctctatggccaaccactattcttgccatactttatgcaaataatcaggccaggtataagactaaaacttatttagcaaatacatttgtcctgctatgatttgtctttcataaaaatgggagcctggagagagaaaaatttgtgtttcaaaagaaaacttcaatacaactgttattaaattctaggcttgttcattatttttgagttttattatttgcctataatttggactgaatcctaaattctttcctggctataaatatcaaaagtaatgatttcaagattttcttccattttggaatgttagaaattaaaactgtgcttttcttcaagccctgcaaactgaaactagacaagttaagtgaacttttggagaagtcacagcaacttatatataaacaacttttgtgcccgttgatgcatggactacacgaaagggtcacacgaatactggatttgtactgaaattcagagaaatctgtgagattgtcactgcagttagatgattcagagactctagaaaaatgagtctataggctgggcgtggtggctcacgcctgtaatcccagcactttgggaggctgaagtgggtggatcacgaggtcaggagatcgagaccatcctggctaacacggtgaaaccccgtctctattaaaaaatacaaaaaattagctgggtgtggtggcgggagcctgtagtcccagctactcgggaggttgaggcaggagaatggcgtgaacctgggaggcggaacttgcagtgagctgagatcgcgccactgcactccagcctgggcaacagagccagactctgtctcaaaaaaaaaaaaaaaaaaaaaaaaaagaaaaagaaaaatgagtctatagactgctgtagacattagaggtgagccaacatgcaactgaaagtgttagtgatcatggcccaaagaattgctctaattgaggaggcagttgtgtatcctcagttggattccaggattatactttgttgttgttgttgttgctgtaattagtccttggtccttttctgatttgacttcacccccttttccatgggagatgacttcctaggaatgagccttcatagtgatgtaagatcagatgaaacatagccacaaagtcatgtatttaacagtaatttctctgaaagatatagaagaatgttggaggtgggcaggtgtggtggcacaggcctgtaatttcacattttgaaaggccaaggtggaaggatcgcttgaagccaggagttcaagactagcctgagcaacaaaatgagaccacatctctacaaaaaataaactaaaataaattagctgggtgcagtggtgcatgcctgtagtctcagctattcaggaggctgatgtgggaggacctcctgagcccaggagttccaggctgcagtgagctacaatcatgtcactataccctagcctgggtgacagagcaagaccttgcttcttaaaaaaaaagtgggaggcggggttggggcaacaggaaggcaaaaagcctcagggatctccagatgactgccctctaaatagttctttgctggcctcaaaatctttcaagatgtatagcgtttcataaaacaaggcatgtcaattataacttcaggtgtgcaatcaaaatctagctcctaaaactaaagcctgttaagttttattctgataatatttatcttcccaggcacagaacaaaggcaaaatgagatcaattattcttccacctatcccatctctttctacctgtcttcccccctgtaaggaaatatataaatactaagccttctgcaacctcttcagagagaacacacccacagaggttttctgtgattcatgttttcccagggtgcaccctcaagctctggctcaataaaccttaactggtcaagacccttgcctcagtcaatcattctggatgaccaccatgagtcttgcacaggccttcactgatccctttgctgcccaggtgatgtgtacctaggtgaatcaggtccccacgagtcaaacactcttctccctttctgcctcctctacctccctctcctcattcagtgccgtgtgccctggtctggccccagctccaggccattagtattagcctaagaaggcaaggccaggatgaacaggctgagaaggaaatcagaggccaacaggcatgaaaagaggcagatgggactgtcatttctcagagccacccactctgggtgtgttttatgactgctactggatttggaatcttttcctctttgtggccataatgggaactcacccttctcctacttccttcccattacactttctattcatagggaactccttttatgaccagagaaaggctgtaaaaatagttgacaattgagtaaaactgactttataatgactgggaacctggctctgtttttttccaaaagagactgagattcctcaaagctagcttttatgcagggctgtgcagttgtgagtgtagcattagggaacaggtacataagtgaagggtgagacagaaaacaaaatgctggctctttgtcaaatcctgaaagtagagggggcaaaaatcattctggaaggtgtatgtcattcaggagaccttggaaatctcagggtatcctcttcccagatgaagtggaggatgaggttaaattatggagttgggtgtgtgatactgggtacattacttctctgcctcgttttttttttgttgtttttttgttttttttgatggagtctcactctgttgcccaggctggagtgcagtggcacgatcttggctcactgcaagctctgcctccagggttcacgccattctcctgcctcagcctcccgaatagctgggactataggtgcctgccaccacgcccggctattttttttgtatttttagtagagatggggttttacgatgttggccaggatagtcttgaacttctgaccttgtgatccacctgcctcagcctcccagagttctgggattacagttgtgagccaccgtgcccagcctgcctcatttttttaatctgtaaaaatggggataacatccaggaatttttgtgaagatgttaactacatggaaagatcttaggatagttcctggcacatactgagttttaagtcagtgcaaactattatgattatgggaataggaaaaggtgccaccctggacgtgtaggatgagggggtattttctagccagggtcctagcaggccaaccggagatgaagatggttaagcagaagcagcttaacttcaggagtggaaggattggggagcagtagctcatgcacaagattctgtgaaaatgcctttacctaacagcagaaatacccagaatgggtgtggcttctgtcacaattattgtctaaaaatgtgtcgtagactcaaatggcgttgatgtaagccaagtacagaaaagggcttcagggctgccttgcacatagcattcatcttgtcaaaggaaaacattcatcttgttaaaggaaaacattcattttgctaaaggaatccccacttgtagccctggttattatttttgtctcagtactattcttgtttatagtttgtaaagagaaagactgaagaagtgtgaaatacggaagtgcatgtatgaattaacagggcagaattgggactggtatgcgtaagttaagagaaagtgcatataaatttatgtgaacataaagaggacttcttgttttaagcagacctctttgtataaaaaatgtgggctgtcttgagtggatggcagactctatcacaagaacattctagcagagtcacgagagaatggggagcatgacttctttctaaatggcaagttaagagtatgtaagtcgatgaagagagaggagatgaaggagaagatgggtgaggatgagagaaatgggatagagaaaagaacagactgaaaggaatgtttaccaagtgctcatcaggtaccagcctctgtgtctaataccttacacatcttaatttactctttgactgtcattttctgataacagtaagagtcatctttgtgctgcagatgagaaaacgctgtaggaggtgaagtgagtggtccaggatcatccagccagttcatagcagagctggtgtgtttcacctcaaagtttgtgctcttgcctgtgattcacacaaaacaatgagatatagaaagaaggcaaatgaaatttttgttgtgggtgatgtttatggaagttaccagtgttaggcagaataatggcctccccaaaatgtccacatccttatccatggaacctgtgcatgttactttatttggcaaaaagacttcactcttgagatggggaggttattctggataatctagggtggcccagtgtaatcagaagggtccttgtaagtgaaagagtgaggcaggaaggtcagggtgaaaatgctgcagtctgagactccactaaccattgctggctgtgaacatgcatcagaagacaaaatttcaactaatgtagttatagatctgattggcttttaattgtgattcagggtttggggcagctctcactctacacatacagtgatagctccccctgggcaacataataacagagcaatgggttttgtcaaattggaaccagtagacagagccatagaaataaatggattggttaacatcagggtacttcaggttactctttttggggtaaatgttaaagcagaggggacttccttatgatgttgactcagggagactggaatcttctgttttcagaaaacattggtctgttttgagatctgcttccttaaaattccagttggagtatgcagcatttagtgtgagtggctctaatttggagtctttagactctcacttaagtgagagtgtgaccaaagcttaaagcattagcattactctcagttatcatcatttttggcttccattgtttataggttatgatatcctcctgatcacacatttctttgagtttatgtagttccagccaaatagagaccatttgatatttgatggatggcagcacgcaaacacttaaaacttttagagattacagcacaccagggagaccagtagtatgactatgaggaagataatgttaagagtttggagtatgcacctttggtaagatgcaaaccaactgaaatagaatagataaaagaatgaaccagatgagtgtagccattttaaccaagtagcatgtttgttaatttttgcaactgagactctataatacccgatatatttatccatgtgcaacaagaagcatcataaactacacagactcctctctgatcagccaatagggagcaattttattatctagcattgcatgcctgggttaaattaaaacagacagtgagaacaagtgagtctaggagtctgactctaaaagagaccatagtacatttgaacaaagagttgtgttaaagatgctgttactgtcagccattgggtggactaaaggatctcatacgtaaaaatttggggttgacacgatagattagacactccgttaatctatcattctctgtattttctcaaatataacatcccaatcaaagccttggtaatataaccaatgttttaaactatatcccattataaagacagcagattctcactgaacttgtgcaaataactgaattaccataaacatatgaatactcatgaatagttgcccagttctgtggcagtcaggtagggagcaaaagtaaatgttataatttttgttcacaaaagtctgctttaccaaattgcagtaaggtatagatagcttaaaagataaagaaattcataaatctgaaaaagaaaacacttaaagaattggcaatttttcaaataaaaaatcttaaaaacgggctgggcgcggtggctcacacctgtaatcccagaactttgggaggctgaggcaggcggaccatgaagtcaggagattgagaccacagtgaaaccccgtctctactaaaaatacaaaaaattagccgggcgttgtggcaggcgcctgtagtcccagctactcaggaggctgaggcaggagaatggtgtgaacccaggaggcggagcttgcagtgagttgagatcgtgccactgcactccagcctgggcgacagagcgagattccatctcaaaaaaaaaaaaaaaaaaatcttaaaaacattatcctcattattatttagttcaatgaaattcatgtttttttccttctgtgttttggtgggcaacttcacaaaggtatcagcctgtttgcaagttcatagacagtccagtggcgtgatcttaaagttatcaggaacttgtgttcaagagtactcgtcagagtattttccataaatcttgaagaagaagcaattttgaatggtagctgattgcaaatgctttgaggaagaataaaaacaactgtctgtgaatgacaaagattgaaaatgactatggttaaaactctgaggagagctcattatgataaagacacagccacatagaaatttagttacttctgtggcatatgacattatgactgataacatattcgatttctaggaaactcataatttttggaacactcatatcggtaacataaccgtaaatataacttagagaaggtttagcaccacttatcaattgacaatgctttccatgtaatttaacatatcaagtaaggctgggcgtggtggcttatgcctgtaatcccagcactttgggaggccgaggcgggtggatcacaaggtcatgagatcgagaccagcctgaccaacatggtgaaaccccgtctctactaaaaatagaaaaattagctgggcgtggtggcaggtgcctgtaatcccagctactcgggaggctgaggcaggagaattgcttgaacctgggaagcagaggttgcagtgagccgagattgtgccactgcactccagcctggcgacggagcgagactccgtctcaaaaaaaaaaaaaaaaaaaaaaaaaaaaaaaaatatatatatatatatatatatatataaaataaggtggcttttccacttagcttctgtttctcaactggattactgagttcttggtggagcccattaatgaacagggccagcaaaatataggcttgtatatgttgaaaaagttttctaggaaattctaatactcccagctaaagaaccattgttttagcctcatgtgctacctattagaacaggagttctccatcctggttacatgttagtagcatctgggaaggcttaaaaattaccaatgcctgggtcccactccagatagtaggtaagaatttatggatggggcttgagcatcatttaaaaaaacatttctcagtgattccaatgtgtggctatatttcccatcagatttctctgatttcttgtggcattcacttttttctattttggtattatgattatttttcatatcttatctcctgtcttaggctgtatgttctctggggtagggatcttgcctttttcatttctgtatctttcatgaacacatgaattggtcatcaggaaaaggttctcaaccacacgtaggctgtgtcctgaatctcaggttcacacattaatgctagagtcgttgttctccatgaggtcagaggttgcttgctttgaagggtatgtgggcaactccacagttcagatagtggatgggagattaccctgtttctaggcatagcattggaactaagaattctatgtgtatatggggtagatgcgcagggaagtgtaggaagacagttctaattaggatggaggaattatactagggagtagagggaatggaagtgagaagaattagtaaagagaagaaatgtgaacttatcaaataggccagagtaggcctctgaagattcttgagtaagtgagtgaactagattttaggaaggtaatgagacaatcatatgcaaggaagatttcaaatactagagacaagaagtcaagcaggacttcgagcagttgttgaggtctatgggaatggataaaatgacacaagtgagagatgttaagaaaggatcaaaagactttcatagtgtattgaatctgggaaacaaatgagcagaggctgggaataatcacatctaagagacagtggggtacagggagcatgcagaccagggaagaagagacctgcaggaattagtgctgagaagcaggagtttattgggaggaggaggagatccattcccgggatacaggtctctctcccaagcatggcggtcagccctgcaggaaacaggacaagaggaaaggccatcatacctgccagtcttcttgaaatgcagaaactacaccagagctactatatcagagccaccctggccagtactccaatcatgatgctgacagtggctctagctgagaggccaggagaacttccttgtactaaagcatctgtcatggaaagaaaagaagagaaggaatgaagttgatgccattttacagtggggtaccccaggaaccagctcctagcatgaagtagtctctacttgttttttcaaggaatacattatttttgtgggaaggttgctgggacgtgattagccaactatattcttgcaggattttttcctctcaccatgtttctaggttgacgatcagtcttcggtcaatttcatcctggcatttctttactcagatattttgaaggctttgtgatgtgaaaaagctgattgctattttatgtgtcattagaactttccaccttttcatggttgcatctttttctcagtgtcttagttgtggcaggtctctatggcagggagctgattgacagaaggcccaggtcagtgcattccaaattgaccacctcctttgcacagagacctctcttcccaggggctcccagcaggggtatggaagcaagcccagttttgtgagactctgtttaactctgatgggtgactagttggaggacgccccatcagccttgcctaaactcacttagaactgcactgctatctaaaacttctttttctttctccttcacaggaatcaaatctgcatcgtggtctgagggctctcccaggctcctctcacacctgccccattttccctcacaggtgtttttcctagtaaattatcttgcgtgtctaatctcatcttggttgcatctcagtgggttaaaaactaacataccaggtttgattctttgcacttagctttttttctctctttcacgtgtaaccagtaaccatgtcctcgtgtttcctgtgttgccttttttttatatgtgtgtgtatttacctaagataccttttacacacacacacacacacacacacaaccttttgcatctgtttctttatttctattggaaccatttacttttggccctcaccagtcaactcaggctgatgattaatgctatgttagctactgttgaggggcagctcctatgggccaggccctgtgctaaatactttacctcatttgatttatacaataactctcttgggtagaacattatttccattttacagatgaaacgacagaggcttagagtggtgaaaaaactttcctgatgtcatatggctggtgagaagtagacttgagatttgattctaggactactcagcttcaagctaatgataacagtagtaatatatcagctaaaatttatgaaacatttcctctgtgtggggcattttgctgaaggtttcattgatgattacataaaactcttaaaacaatgctatgaagcaaacactgttactgcaattttcagttgaggaatcagaggctcagagaagttaagaatcttgtgcaagaaatttataactgttaagtcttacattaaaaaagaagaaacatctcaaatcaacaacctaatttgcaacttcatggtacaggagaaaaacaaactaaacccaaatatattgaatgaaggaagtaataaggattagagtggatataaatgaaatggagaatggacaaacaatagaggaaatcaatgaaaccaaaagttggttcttcaaaataagatcaacaaaattgccaaccattaactagactgactaagaaaaaaagagacaagatggaaattactaaaatcagaaatgaaaatggactcccagcatggtggcttacaccttcaatcccagcactttgggaaggcaaattgggaggattgcttgaggcctggagtttgaaaccagctggggcaacatagggagaccctgtctctacaaaattaaaacaaaaattcagctgggcatgatggtatgcacctgtagtttcagctacctgggaagctgagttgggaggattgcttgagcccaggaggttgaggctgcagtgagttttgatcgcacctctgcactccagcctgggctgacctaaggagtgagactcgtctttctctctctctcaaaaaaaaaaaaaaaacaaacaaaaaaaaaacgaaagaaagaaaagaaaatggagatattatatatcaattctagagaaatattgtttacaaaagtactatgaataattgtatgccaataaattggatagcctagatgaaatggacaaattccaagaaacacacacaaaaaatctgaatagacctataattagtaggaagattgaataaaaatttcatttgacaaaattcaacattctttcttaataaaaacatgctaagtatgaatggaaggaaactatctcaatataataaaggcagtatgtgaaaagcccaaggctaacatcatactcaatagagaaagactgaaagctttccccctatgatcaggaacaagacaaggatgcctgcttttgccacgtctatttaacatagtattacaagtcctagccagagaaattaggcaagaaaaaaagaagactttcagattggaaagaagaagtaaaattatctgtctgttcacagacaacttgaacttctttgtagaaaactctaaggatgaaaaaaacctgttagaatttattaataaattcagtaatgttgcaggatacaaaatcagcatgcaaacatcagttgcatttctatacactaacaatgaacaatctaaaaaggaaattaagaaaaaaattttaattcacattaacatcaaaaagaataaaatacttaggcataagtttaaccaaggaggtgaaaggattgtattctgaaaactagaaaacattgctgaaggaaattaaatacgacctcaaaaaatgggaagacattttgttttcatggattggaagacacggtattgttaggaggataataccacccaaagtgagctatggattcaacacaatttctatcagaattccaatgacatttttttgcagaaatagaaaaatctatcctaaagttcatatggaatttcaggactcaaaatagccaaccaatcatgaaaaaaggaaccttgaaaaaaaaatgctgaatcctgatttcagcatttactacaaagccacagtaatcaatacaatgcagtacttgcgtaaaggaagacagaaaccagcggaatagaacagaaagcccagaaaggaatgcttgcatatatggccaaatgatatttgataaggatgccaataccactcaatggggaaagtgcagtcttttcagcaaatgattttgggaaagctggaaatccatgcagaaagatgagctgaacctttacctgacaccatatacaaaaaactaacccacagtagatcaaagaccaaatgtaagagtaaaaactataaaactctcagaagaaaacacagggaaaaaaactccatgacattggatttcacagtggtttcttggttataacaacaaaagcataggcaacaaaagaaaaaatgggtaagttggacttcatgaaaatcaataacttttatatatcaaagaacattgtcgaggaagtgaaaaggcaaccttgaagtgggaaaaatatttgtaaatcatgtatgataagggatcaattttcagagtatatgaagaactactacaaatccacaacagcaaaaatccaaaaacccaactaaaaaaggacaaaagactgaaatagagatttctccaaggaagatatacaaatggccaatgagcacatgcaaagatgctcaacatcactgatacttagagatatgcaaatcagaaccccaatgatagaatacctcaaacacattaggatggctttgattaaaaaaaaaccacacacacacaaacaacaagtgtttttaaggaagtggaaaaattggagctctagtgcattgctgatggaagtgtgaaatgttatagccactgtggaaaacagtatggctgtttctcaaacaattaaacaaagaattaccattggatccagcaattccacttctggacatatatgcaagagaattggaagggatttgaacagatatttgtacactgatgttcacagcagcattagtcacacaatagccaaaaggtggaaacaactgcaaagtccattgaaagataagtggatagaaaagtgaggtgtatccatacaatggaatgttcttcaatcttaacaaggaagaaaattctgatacatggtgcaaaatggatgaaccttaaaaacattatgttaagtgaaacaagccagacacaaaaggccacctattatataattccatttatataaggttgttagaataatcaattacatagagacagaaagtagaatggaggttgccaggggttagagggagaaggagtgagagttactctttattgggcagagaagtttatttaatatggtaagatgaaaaagttctggaaatggatggtggtgatggttacataacactaaattgcacgcatagaaatagttaatggtggctgggagtggtggctcatgcctgtaatcccagcactttgagaagccaaggcgggtggatcacctgagttcgggagttcgagaccagcctgatcaacatggagaaaccccatctctactaaaaatacaaaattagctgggcgtgttggcacatgcctgtaatccagctacttgggaggctgaggcaggagaattgcttgaacccaggaggcggagggtgagccgagatagtgccattgcactccagcctgggcaactggcactaccccttccctctcatgcagagaccctgtggctgaatctccctgtgtctccaagtgtgcatcactcactgtcctctgtgttgtatccacagcctcatgcagcccgtgacttcagagctaggacactgctcaggagtcttcccggaggctccctgtcttcccatttttgtgcagcctgactggggggaggcttggcttcaactggcaacttgatttagccagatttgggataggccacctgagcaccttttccatacacctgggtcccaccccaggtggagtcagggcagggcctgtcaccagggagctgggagcagagatgggagcagtctgagctgctcctccgtcatccaaggggctcctcctcccatttggggaacgttgtgggcttgtttcaaagccttggatgtttcttgcagctaatggcataggtaaaagaaaacaaaggggtaacagaaacaggggtgccatgtgttggtgacaaagaaaagcaacttgaccttgaggaccctccttcttcccccttggtgaagtcctttccatgacatagggctctggggctgacgaaggcccctctccacgtttctcaggtcagccccgaggtcagccaagagaaatcagaaaaacaggcagaagagagtctatagagataaactgggagggtttaggagaaaagttggggatttgcttgtgctgttggacacaggctgggaataaaactttttttctggctcatctctgaaagccagatagactctaccagaaaacatactgccagtgctccagggatccacttaccagagactgtgatcatcctgactgtggtcctgttgcggccagtggctgagttagtggtgtggcaggcataggatccgctgttctttgtagtgatgttggggataaagagcttttgtgtgtattgctggaatgtgccattgacagaccaagaatactgtgagggtggattagaggccgcatggcaggagaggttgagatttacccctgcatggtaataggtgtctgaaggggaaatggtgggggcatctgggccatctagagcaaaagaataaagtcacaggtgatgtcatcagagggaaggggaagctcctggtctgtggaagagccacagtgtccctctgagccaagtcacaaacctgagccaagtcccaaccaaccccaaccaaacccccgctgtttctactgagacagagtccgagacatttacctgtttctcccatcagaagatgtggactccaagtctcccatgacaggagcaccccctcccctcttattcttggtcaaggctaggcctacccatgtttgcctggggcagaaagtcatgacgagctgggtttctaggggtgggtggggaatctgcatttttggagctgagagggactgagaggcctggcctctggctgcgtggatttgggctggtggcctgggccacagaggaacagaagatactcacagaggacattcagggtgactgggtcactgaagtttgcactcgctgggttctgtatttcacattcatagggtcctacgtcattccttgtgacactgagtagagtgagggtcctgttgccattggacagctgcagcctgggactgaccgggagactctgaccatttacccaccacaggtaggttgtgttctgagtctcaggttcacaggtgaaggccacagcatccttgtcctccacggggttggagttgttgctggagatggagggcttgggagtctccgctgtgcagaaaacagagagaagattgccctgtgtggcacctttgattcctccacaggcaaatttcaattagagttggcatctcccacctctcagcctactcgagtccttaaaagcccacggtgggtgtgtgtgtcacaagacagatgcacaatgatcggggctcagagaccatgaggccgccttctctgtgtgggagaaacacagactttctcaaatgtgaattgggcagcagcgctgggttgtggacagacccaggactgggagttacagatcctggtgcctcttctggtccctccctgaccggctgcctgcctggcctacctaggggtcctcacctggaacatgtaggtgctgggtcccttccagcttcacagtcctactttgcccttcgaggtgtgtttttgagggttctgtttccaagaacattctagagatgggagatgatgggacatgccactatccttaattcctgactgggtgtttcaacagaaataacacaggggaggccggggcaagcctggaggtcggttccgtcgtcaggcagtggagccacaaggtggggcagtttttcccaggtgtttcatcgtgacttacttgagtcagtgacctctaaagatagagcagagtccaaggaatgatctagaaggagtgaaggggacaggcaagaacaggtggctttggagcagaaccttgtttcctttccttggtttttaatgtcccttctttccctgcggggggcagatgaggagctgtggatcctcccataaatacatgtggacatttgcaaatgcaaactgacgggtggggagggggagcctgaagtgctggaaatttggccctcatggaccgtgggtgtttgacagttatgagagagaaatttgggaagaagttttgcaaatattttctcctactggacattatacagagtgaaataagccactgacaggacagatactgtaggattccacttacatgaggttcctagggtagtcacactcatggaatcacgtagtagaatggtggttgctatgggctgggagtggggggaatggagagttgttcatgggtctgcagtttcagttacacaggatgaggaggttctagagatctgctgtacagctttgtgcctatagctcatatacagtgagtatttcttatgcataaggcttagggccaaaagtgttttgaatttctaacttttataaatttttgaacatttgcagtatacttactggtttagcatctcaaatctgaaaatcccaaatccaaaatgctccagtgagcatttcttttgagaatcacgttagtggccaaaaaatgtggaattttggagcatttcagatttgggatttttgatggtcaatgtgtaactctaatttgcattttaaaatttgtcaggagtttagatattatgttttgactatagtcaaaaacaaaattggaggaaacatgaatttttttccataagtagaaattgctattaattgtccacagatctaaaatcaattggtggaaggagtatttctcttgataacaaaataaggtttaggcgtcctgtgaattccagcaggatcacattatgctcaaaggaagatcctgaagttcgcttgaaattagcaactcccaggtagagggaggcacgtgagtcctgttaagaggacagaaccggtcagagaggaagtcttaggtgtgtcaattccataaagggaggaacaatgccaaattaggagaagcgatgtgtgttatgttagtaaatttagaaagcttcctgcccctaattcctatgcagagttaggcaaaattgggaggagcccaaaacaggtatgcgcaatgctttcttcattttctcttgacctcgggagacacaagtagaattggattaggtttttgcgaattggacagagtctaagtgagacgccagtggctcatgcgtctccccacctgaaggaccccatcttatcacaatggtgccatcatgaggacacagatgtgtgtggaacaggcagtaagcccatcagacagcacctgcctggccatccaggatctagtctctaaagaggttttgcatcattcattctctcattcattccctctccatgagagaacgatcgagtgtgtgtcacatgttgggcctgtcctggtgcagggtgtgagtggggagagaaagcaaagtcctctcttttgtcctcccatgggagtgacagcaacacatcaggaaacaggatttcaggttcagtgaggggggttaggatcttagagggagcctggacattcctcgcactggctctgacagttggggcaggtgatttagttctggagtacgaatgaatcagttgcttatttgctctcacttctctgagctttggatgctcaggaagaaaggatttgagccaatggatgaccatggggtccgtggaacgcaataagccctgccttcttgtggaagagaggacggggctgtggctggagagagacctcatgtgaccctgatctatccctcgtgtttgtgtgaccctggttcagtgactgtgtcttcctgtgcctccgtttcttctcaataataagcttctattaaaagaaataataggctgagcgcagtggctcatgcctgtaatcccagcattttgggaggccgaggcaggcggatcatgaggtcaagaaatcgagaccatcctggccaacatggtaaaactctgtctctaataaaaataccaaaattagctaggggtggtggcatgcacctgtagtcccagctactcgggaggctgaggcaggagaatcgcttgaacccgggaggcagaggttgcagtgagctgagatcgcaccactgcactccagcctggccacagagactccgtctcaaaaaaaaaaaaaaaaaaaaaaagaaataaaaagaattattatttctttctcaataggaaaatgatattttctgccaggttttctatgaattagcattaaattatccatagtcacctgacctgaagcttgcacagaggaggcgctcacacaaacagcacgggttattatttgcctccatgagagggtccccttggcatgatccctgctggacaagttgctgttaggaacatctttcttctatttctgtccctggggacactgaactttctatggagtctcctaagcctcccaggccagttggctgatggcctaagaagcttgtccatctgtcctctccactctgagtctcaggtgaaggacaagactctgtccttgcccagatgaggctctggggtctaagccctggctggtgagcagctccaggagccacagcccttggatggctggtaaatctttgctcctagttggccctgcccaggaggctacaacccagtgctggcacaggtttcccagggttacctggagtcaggatcctgggacaggggtctggagcaggggcttccagggatgaacttctctgtgaggatcccaggatcccagggagcccctcaggtcaggccctgacccagttctttagagtttttctcagggtcaggtccatggggagggcacggggtgcctggctgagtctgatctccttctgctgagtccccccatcagactgtcattcctctgccgtgagtgtctgcagggtctggatgcaggaaaggaattctggtctgtggaagtctgtctcccctgagtgtgtcctgcactaaatgtccaaaccctaaagtgggatgtaatgcagagagggacatgggcacagcccaggcctaacaatcctgtgtgtgggaagtagaactgacccccaacacccagaggtcatggggaatcactcacgatgtacgctgaactggccagttacttcttcactcataagatttagctttatgacttgtagggtgtaggatcctgtgtcatttctggtgacgttccgcatcagcagggatgcattggggtatattgtctctcgattgctgtatgcaggccctggggtaatctgttgatttgatattacatatcctataattcgacggttggcatccactgtttcccctttgtaccagttgtagccacgagggtcctggggcagattgtggacaagtagaagaacctccttcccctctgcagcattggatggcacagcttcaatagtgagctgagcagtggtgggcgggttccagaaggtgaaaagtgaggctaggagggggagagagcatcaagcaatattgcaacatatgtattggagtagaaaaatggggacatcagctttggagtttgtgtgtttttatgtgtgtgtatgtgtgtgtgtcctactgagtcaatgtcagcagcacagcccccatttcttcaacacctctgaccttggcatttccctggtggaatcctcttcttcagggttctgcacggctccctccacactgccctcagatcctgctcacatcagggcatccttgggagaccctttctctgacacctcctctagagacactgggtcttccctttctgacctttccctgctgtgttccttccagggctcctgtcagcgcctgacctcacattctagatctctttgtctgtcttcctccccaggagagtgtgagctctgtgagggcagggacttgtgtggtgttggctgcaccccagtgcctgggacaggcttcagactcctgtggatgagttcctgagcattccctgggccctctgcttcctgaggcttatttgccaatgtctgacattgttggctgaggacaatgtttcataccctggttatgctttatttgaagtgtcatctggtatggttattattatcatttttcaaaatgtagtggccagtgatgattaaccaggaatatggaacacttgagatgttcctgcctcttaccaattccagttcaatgtgattttcctgttgtgaccccttcccctctcttgtgtcctctcctctattaaggctccaacagaagtcctctgtcccctctcagagccccgtcctccccaggagaccccagccagtcactgtgtttcctcctcctgtcctttcccaggaagtcctctcctcacctgtgagcaggagcccctgccaggggatgcgccatctgcaggaaggggctgagatgggccccatggtctctgctgcctgcgtgttctcctctgtggagatgagcctgggatccagaaactttctgagcacggctgtcagctgtgctgtccttcctccttttgtgctgagcctcttcccggggcaggagcacttctcaggctcatgggcggggtctgtgcccaggacacctctctgtcccctcccctctcagtcctgcctccctgtccctcctttccctttattttctgtctgtgtttcaggcccctgggaattgctgaggtctctgactccttcagcagtgattctctcacccaacctctgcacacactatgcagacacacacacacagagacacacacatacacaaagagacacacacagtcacacatacaccctggagactgggtgagcacagccctgtgccctcagcatcctgcagcctatgtctccaggtcggggtgcacagtcgctccccctgccctctcccatccccatctggctcttcccttcagatcaggaggtcagcgctccgcaaggaccctgtcacagggacaccaccactgagctttggggaggtgtgtgctcactggtgagagggatcctccccctctctcattgtgtcaagcttggttgcagcttccaaggatggacattcaatgccctggatatcccagaggggactgtccttactggtggtgtgcagggcaaataatctcttatgcctcctgagagagagggctgttctggttggtcagtgggggctgtgggcctagtggtcatcagggacaggtatcagccattctcttgctctttgggttctggcagctgagctggggctcgggccttccatgttctctctgaccatcttgggtgtcctctgttttcgcccggctgactgtcctgtggtcaccccaccttccctatggttggtgcagcaggaagtggggagttgcccaggggccccacaagacagtgctctctgagatccaggagagggagcctgggacagagcaggggctcagagctggagagactcatcccaacttactctgcagccaggatgggctcagccctccccatgctgatatcccctggggtctgtcctaagggtttggacctggtcaggcccctctgtgtagagaaaggatgggcagcggccggggagcccgtctggggggacgttgctcacacctgagagggcaggtaggggtgggccatgttctgggaacaaagggagctcattccttgccccccagcttgtgtacatgagagagcgctgtcctccctcctggcttcacgaaggacagcagggggcaggtggctacatcccagacagtgcctgggcgtgaccatcacatactctccgagcctcctggggtgcagagggaaggtcatagggtgcctggctgattccccagaggcactgtgggccctcaggcagctgtggttctgtcagcgctgggctcagcctgccatgccgtagagaacaggacacacggagcaggggcgggtatttagggagcagtcacagaaagagttgatgaggatggagggaggtcacgaggggaaagcgcccagtgtggcatcccgtgcaccagcgctgccctgggagatgccttaactaggcccagggaaggattgggtgtgtggggcaggagctgcctgcagagggggcggcctcatgttgccggctgcctggctgcagggaggagctgacagagtccgtatggggagcttggagggtaaggaggacgtgggccgaggtgccctggtgagggtggaccctgctgggctgtgggttccgctgagggaggtcagcagcccctgggaaggctccaggctggagggactctgtcgccctctggtggactggaagggaagtgtgggtggccgcagtcccaggtccggctgcgtgttttattccacatggatctgcacatttcacacgaggtcacccacatgttatgtcgagctccatcacattccacatccgtgtttttctctgtggctgattctctggtgtgatctctgagcctgtgttagtcctcctcacaatggtcacagctgtgtgtggagatctaatggggtgtgtgtggctcatgtgctcacacagagtgtcctggggtcaggctttatgacctaccctgccccaactccacaacaagatctgaataatgcgccaagtaagataaagtcagaatccatgggggagggtgagagtcctggcagtgctgaggtctgtgtctccagcttaactctcagtctctttgcaaatacatttatgttgtgcatctgcagttggctgggcagtttcatgtctctgaatccttgaatctctctgtggataaggtcatgtagggactgcatgtaagtgtatgagggctatctgattagggtgggtatgttttacgtagtaggttttcttcaccaaagacttttcaaaaaattgtggtagagtgtatatatgtacattcatatatcacctccacttcctgagttcaagcgattctcctgcctcagcctcccaagtagctgggactacaagcgtgcaccaccatgccgggctaatttttgtatttttagtagaggtggggtttcaccatgctggccaggctggtctcaaactcctgaacttgtgatctacctgcctcagcctcccaaagtgctgggattacaggcatgagccactgcacccggcctgtatatcttctttgaagaaatgtctatttgagtttttgcccatttataaacggggtggtttgtctttttgttattgagttgtagcagttctttatatattctggacaggaagctcttctatatgtaatttgcaaattttttctcccattctgtgcctggtcttttcactttcttcataatgtcctttgatgcacaaaaggcttgcatcttcataaggcttaatttatctctttttccttgttgttgctcatgcttttgtgtcatatctaacaatccattaccacattcgaagtcatcaagatctacccctctttttctttttttaaaaaatatatattttatttacataggttttttggggaaccgattggtatttggttacatgagtaagttctttagtggtgatttttgagattttggtgcacccatcacccaagcagtatacactgaacccaatttgtagtattttttccctcactcccttcccaccctttttacctgagtccccaaaatccattttgtaattcttatgcctttacatcctcatcacttagctcccacttatgaatgagaacatacgatgtttggttttccattcctgagtcacttcacttagaataatagtcttcaatcccatccaggttgctgaggatgccattaattcattcctttttatggctgagtagtattccatcatacacacacacacacacacacacacacacacacacacacacacatatatatacataccaagtttctttatccactcattgattgatggacatttttgttggttccacatttttgcaattgcaaattgtgctgctataaacatgcatgtgcaagtatctttttgtataatgacttcttttcttctgggtagataccaaaagtgggattgctggatcaaatggtagttctacttttagttctttaaggaatctccacactggtttccataatggttgcactagtttacattcccaccagcagtgtagaagtgttcccttttcacaacattcataccaacatctattattttttattatggccatcgttgcaggagaaaggtggtattgcattgtggttttgatttgcattccctgattattagtgatgttgagtatttttatatgtttattggccatttatatatctttcttcaagaattgtctatgcatgtcctttgcccactttttgatgggattgtttgtttgttttttccttgctaatttgattgagttcattatagattctagatattagtcctttgtcagatgtatagattgtgaagattttctcccactctgtggggtgtctgtttactctgctgactgttccttttgtcgtgcaaatgctctttagtttaattaagtcccagctatttatctttgtttttattgcatttgcttttgggttgtcatgaactctttcctaagccaatgtctagaagggtttttctgatgttatcttctataatttttatagtttcaggtcttagatttaagtccttatcaatcttgagttgatttttgtataaggtgagagatgaggatccactttcattcttctacatgtggcttgtcaattattccagcaccatttgttgaatagggtgtcatttttccacactatgtttttgtttgctttgtcaaagatcagttgactgtaagtatttgggtttgtttctgggttctctgttctgttctattgtttcatctgcctatttttatactagtaccatgctgttttggtgactatggctttatagtatagtttggaatcaggtaatgtgatgcctccagatttgttctttttgcttagtcttgctttggctgtgtgggctctttttggttctatgtgaattttagaatttttttttctagttctgtgaagaataatggtggtattttgatgggaattgcattggatttgtagattgcttttggcagtatggtcattttcacaatattgattctacccatccatgagcatgggatgtatttccatttgtttgtgtcatctctgatttatttcaggagtgttttgtagttttccttgtagagatcttttaccaccttggttaggtatattgctaagtatttttttccagtattgtaaaaggagttgagttcttgatttgattctcagcctggtcactgttggtgtataggagaactccatcacattccagacccatgagtccgtctctgtgattgcaagttcactgccctgcctctttcacagtcagatgttccaaatgcagattttgtgtcaccttctgtgagtttgtgtttgtgtgcagtaggttgtactgtgtatgcccggggtgcaatgatgccttgagctgagcactgggcaggggtttgggagcagaagagggaggtgcagggcgggaatatcaatgttaggggagcagggggagcagggacaaatcatcttcatttcttgttgtcagggacaaattctggggcacagcacctggttctggggcacagcaacccactgtttgtgttcctgggtgttgtgagtgctcataatttcatgtgtccttggcatccatttcttaaggtgtaagcttaactgcctcatatcagaggcaggacttggtcaccatgacagtttccaatactgtacccggtcaaaaaggctccagttggtggccagagataaaatcttagaggcatctctcctgggctcccctccctccagctgcttcctttaaactgatcattctgacatttgtcctcaaatttaaagtgaccacctctcagtcacagtatgatctccttgacccagtgttcacttgttttaaacctgtccattaaagctccctgttgtaaacctgtcggataactctgtggacccagtaaagccactggcttacaggactcttctctcctccctccctgggctccctgacctctgtgtctgtggtctccaggtgtgctgtgtgctcccccatgtctgtaagtagtaaaactcttacactttattttattattattatttctaattttttgagacagagtctctttctgtcacccaggctggaatgcagcggtacaatctctgctcatggcaacctctgcctcctgggttcatttttgcctcagcctcgcgagtagctgggattacaggcttgtgccaccatgtctggctaattttttgtatttttagtggagatggagtttcattgtggtggccaggcgggtttcaaactactgacctcaggtaatccacctgcctcttaaagtgttgggattacagacatgagccagtacacctgtccagaactcttacacttttacattgtggttgtgtcactcactgaagcctcacctgccatctggggcctgacatcgaggctgacccaagggacccatgcaggttgagcccctgctggagtgcttttcttgaggccttggtgctgctggggacaggagctgccagctaatttgatagagaacctgaagagtttcactcaaaaccctgggctagatgatgtatttctgggcttgggctgctataacaaacaccatagcctgggtgacttaaacaatagagatctatttctcatcgttatggaggctgggaaatccaaggtcaaggagacaggtgactcagccctggtgagggcttccttgcagatgcctactttctttgtgtatctgcacatggtgcgggtttttgaaggggtggagagacagagcgagggagaaggagagatgccattctcttgtattttccttttattataaggggattaattccatcatgaagcccccagctttatgacctagtcattctctaattacctcctaaagaccccacctccaaattccatttcattaaggatgagagtttcaacaattttgtgggggacacattaagtttcttttttcttttttttgagatggagcctcactctgtcatccaggctaaagtacagcggcatgatcttggctcactgccacctctgtctcccaggttcaagtgattctcctccctcagcatccccagtagctaggattacaggcatgcactaccacgccttggctaatttttgtatttttagtagagatggggtctccccatgttggccaggttggtctcaaacttctgacctcaaatgagccacttgccttggtctcccaaagtgctgggattacaggctgacttattcagtttctagcaggggaggtgagagctgctttccctcctgttcatgggacctggccttttctgctgagatggcttcacactcataatctcaccctaggctgcagacccacagagcctgtgtcctcgactcctctcctgcccattcctgggtattccttcctgcaccacgttctccgtgtggccccacctgctctcgttccagggagctgcccctgggttgctgcccctctcaccatctttgggctcactggcctctgccatttcttctgagccctgaacactgatccctggcagggaggaagtgtgaagctggaatgggtgctgtccaaggtgctgctctctgtggacagtttgacagtgagggaacctgatgtgtcaccccagaggaggcccaaaagctgtttctcaggggtgcctggattgtagtggggtgggtacattagagtgggctggaccatggactgcagggaacctgttctgtgtcagcgaccagctcctcaagctccatgttattctctgtaactgactgccttgtgtgctccctgagcccaagatagattccttcccacaatgtccagagagtcagagctgtgtttggagacctaatggggggtcttgtgtgcttacacagagtgtccagagaacaggcttcatgacctcccctgccccacccccacatcaaggtctggatagtgggccaggtcagataaagtcagaatccatggggagggtgttgtcctggcagtgctgaggtctgtgcccccagcttaattctcagtctctttgcaaatacatttaagttgtgcatctgcagttggctgggcagcctcatgtctccaaattcttggatctccctctggataaagtcatgaagggtttgcatataagtatatgagggctatctgatcagggtgggttttacatatacatatatgatacatatttacaaatatgcataatacatttattatgtattatgccattttaaccactttaaaatgtgcaatcaaatggaattaaccaccatcaccactatctttcctagaaatttctcatcattccaaactgaaacgctttatctttttttttttgttttgttttgaaacaaagtctctctctattgcccaggctggagtgcagtggcgcgatctcggctcactactacctctgcctcctgggttcaagcgattctcctgcctcagcctccagagtagctgggattacaggcgtgtgccaccacgcccagctaatttttttgtatttttagtagagatggggtttgaactgttttggccaggctggtctcaaactcctgaccttgtagtctgcctgcttcggcctcccaaagttctgggattacaggcttgagccaccgcgcccggccaaccgtgtatcttttaaacaataacttccgattttgtccaccctagacctcggtaatctctagtctgctttctgtctctatgaatttgcctattcttgatgtttcatataagtggtgtcatacacatatgtcattttgtttctggcatatttcaatagcataatgtttccgaggtccatccatgttccagtgtgcgtcagagttttgttcttctttatagctgattaacttgctgttgtatgtatcgccatatttgtttatctattcatgtgttgatggacacttgggttgtttctatattttatctattgtgaatagtgctgcaatcaacattcccattcaagtacttctttgagtctctggattcaattttttgggtatatacctaggaaaggatgttgttttatatgggaagtctatgattagctctttgaggaagagcacaactgtttctcatagtggctgtacctttttgtattctcaccagcaatgtataaggattctaaattctacataagtctcccacttgttatttaacattttaaaagaatggtaactattcccctaatgactaatgaagttgagggtcttttcatgtcctcaactatttgtatatcttctttgaataaatgtctatttgagtccttttcccatttataaattgggaggtttgtctttttgttattgagttgtagcagttatttatatattctggacatgaaacccttgtctataagatttgcaatttttttctcccattctgtgtctggtcttttcactttctggataatgtccattgatataaaaaatacttgcatcttgataaagcccaatttatctatttttcatttttgtgtctcctgcattcatgtcatatctaagaatttattgtcacatttgaggtcatcacgattcacccctacatcttttctaagacatttttatggttttagcttttatatttaagtcactgatcaattttgaggtaattgtatgatatggtgggatgaagagttccataagttgtttttcatgtggttatccagttgtccctaaaccattatttgagaagactattcataccccattaaattatcttgacactcttgttaaggagcaattgaccataagtatgagggtttatttccggactctgagttctatcccattggtctctgtgtgtatccttatgccagtagcacacccttttaataattgtactgttcatgagatttcaaataagaaagtacaagtcctccaatttattttggcaagattgttttggctatttaggggtacttttttttttttttttgaaaaacaactaggtcaatggttcacaattggggaaggcttttctctttcctcctggagggaatttggctgtctagagacctttttaggaacctaatctaaatagataaattatccccacttcccttgctgaggtgttgtgttaaagtgtgcattgcctcctgtggaaaaattgagagatcctggaagcacttggccatgtggtgagggacagcaagttccatgatgatgggcagagacgacatcgtttggaacacagtgttgttggaggagctgtatgcatctctacttctttatttctctgtacaacccacatctccaccagacacagtagatattaaaatcattgtttatcctctggtgcacggatcttggctgacctgtcagcaggagctagaagtgatacctggcaaggcaggggaggagcagggctcagcagggtgaaagcagctgggacccagagaagccagaaaggtctgactcttagaaactaggggccaggaagtgggtgtcctcaggggcaaatggatcacagtggtacccattgcagtggactggaagaaggtaagagacactgggtatcctatgtcctctcttagctccctaactgaagatttggggcctgggctggttgtgtcctgtagcaggcagcgggtagacagggatggctgcatatcaggccacagtctatgtcatcttgtcaggcattgtcactgcagatggagaattctgttcagatgcctggcctgggcacatgtaagggaccaccttattcttttaaaattattttaagaaaacaatatcagcaaatgtgatcaatgtttatttttctagaatcattattaatgtcatgttttacaacatgtctcttagggaaatggtgagaaccgtgaacacaatgtgtgttttaagtggactctcctataatttcaacttttatacattcttatagaaactattttctctgtgaacacaaaggtaatatccctgtgttcatttctacttggaactctgtattcagggtggagcgagttacatttccccataaaagatggaaagcatttgactaccagaaaaagtgtctaaaagctgctggtaatgattatagggctgcaggtggaggtcagttcaagagaggtgagggaaactaatgttgagtactttttctcaaaataatgtgcagaaggaacaaccttggcccacctcatgttgggatgaatgagggacagaaatagaggtcagtaatttaaagatcaaattcaagagtgggcaacaggtttgagattggaatgggtgtgagaggtggacggatgaatggtgaagatgttcaaaacaccttcctaccccatattgagcccctgaggttgagacagtgtccagagcaggggcagcagaatgctgtgagctcacagggctggcatgagactttagcacagtctagctactacgtctattttgggatggattcatatttaaggaataatctaacagtatacaattttgaaaatatatagaaattcctttgctatgaatttcttcttcataagatatttcttcttaatgagagaattgatttttttttgagatggagtcgcaatctgtcacccaggctggagtacagtggcatgatctcgactcattgtaacctccacctcctgagttcaagcgattctcctgcctcagcctcctgagtagctgggattataggcatacaccaccaagccaggctaatttttgtatttttagtaaagacagggtttcaccatggtgatcaggctgatctcgaacttctgacctcgtgatccgcctgccttggcctctcaaagtgctgggattacaggcatgagtgaggtggactgtagaccctttcgatttgtggttacagacccttggaaaagcctcacgcttcctgctgtgaggtacaggtagtcatgtggcatcacctctaaacgtgtcttctcctgagacatcaagtttctgattaagtcaaaatcatttcaacagatattgaagatgtcagttttactctcacactcacaattcttctaccaagagatgaaagattttactggtgacttgtttgtagatattaagatagatcagtgatttggacgggaaattttgccctccagggggcatctggcaatgtccggagacattgttggttgtcagagctgggggagagcccacaaatggtgctgaacatcctagagctcacagacagccccaccagcatgaccaccccaaatgtcattgctgaggagtggagagccctgcggtgcccttcctcagcttccctggggcttcctctcacctgcttctcccatctctcccgaccactccttcacctcagttccatcgttgcccaacagtcctctccacctgaacttgctcttagtccaaggccagccctgatctctcaactctcctggcttccttttgctccttagcaggaggtgcccactagagggcgcactcgcccttcccggcactcaggctctacctttcctttctaagacaagcgtggctggcacaatcccagccctcaacagtctttaggtttgctcacggggcagctcttggacaggcatcaggaaccccagggaggagcctgactctggagatttttgtgcatggactggggacccggagccaccccagggcccaagtcactggggaggggctgggtccgtgcacggggccgcacactcagggtccagacactcctgccctgtgtgggtgctggggacatggccatgcgcctgtgtccctaaagcctctgtcactcaggatttgtgcctgaggaccttggctgggctgctgtgtaaacttccagatggagcctttcccagtggggcacgagtcctcccagagatttcaaggagggccttcaccaggaagaatcaggaggaatgtgacagccaccagggtgtagtttccctccagggcctgaaaagaggcacctctcttcatcatttgcccagagtatttgtactgtctccatcatgatggaatgatgccattttgcttctgttctgctaataataattttgtttctagctaatctgttgatgtagtaaaaacaattgttaacgttgctatgttaaagtgtggcattttaacatgatgttaaaacactatgttaaaccttgcatttctggggaagcaactcaaggtggtaaattctgactcattttggtcgtacttcatttgtggattttccgtctttgtttctgagtagggcctgcaattttactttttcattgtttcctggttggcctttgataagaaggttctacttccacaaaaatgagttaatgagtattgtttattttctttttctctggaagtgttgtgtaaggttgataggagctggtctttgattgttttgtagattttaaaaatttaaactgaagagattttatacttcttgtttggtgaagtaacatggacatagcataatgtctgcatgtttgtgtgtgccaatgacagccctgtccagatcaagacagagcacattgtctgcaccaagcgacactcctgcgcccctcccagccactgcaagcaccaggtcactgtcattctgatctctatcaccagagatgagttttgcctcttgggaactttatagctgtagaatcaggcttcattttcccttctgcattggctcctttcttgcaactagttgtgtgagatcatgcatgttttatgtagcaggaatccatttattttcatgttgtaaattatccattagtttgaatacaccacagttttatcccctgtattgttgcacatttggactgcgacactatttgggtcttctgaatcatgctgatgtggacgtttctacacacatattttggtggccttactcatttccttgggtgtagagaccattgcatatgctggaacttctaagattgtagattttcctgttagagagttgatcacatctaaattcccaccagcaacatctccgtgtccagttgttccaactcttgttattggcagtcgattgaattttagcctttcttatgttgttgggatgagatttcataatggttttaatatgcctttcctaaataaacaacagtgtaaatgcatcttttcatgtcgtcatgggccattacacatgttctaccatctggtgcctcttagagttttctgccatttaaaaacattgtgttgtcagtctttctcttattgttattttgttatgtaccttgggtgtggcttctttgtcatttagatagatacacatgtctgtatacgtcttgtgtatgtaggagagagggaaaattgggagccttttgaagaacagacattctcaatgtcaatgaattttatctgttgttaaaagattgtcatgtcatgtgaattagagatgtagatttatctttttttctctgtagagatattcatggtcatctcaaatcatctgctttttgtgagtatgcacacgtgtgcatatgtttgcatgtgtgcaaatattgtaattattaagtaagattttaagatgggtggctgggcattgtggctcatccctgtaatcccagcactttgggaggctgaggcaggatttgagcctaggtggtgcagaccagcctgggcaacatgatgaatccctgtctctattaaaaatataaaaaattagccaggcatgatggcatgcccctgtagtcccacccagctttgctcacttcttataaggaagatgagtttcctgttcctgtgacaatggagaacagccttcagcttggtttcctctcagctaaggagctggtttggggttttgttttagaatttggtagttgtaggttaagggttaaggtttcttgatacttggctctaacctctccttatgcctagagtgttcaacagtatgtaatttgtgcaattgctttttgtgattttggtttttatcattcttcttttggatttaaccaacccttcaccgtgtctagagtttaaaacaccttccaagttggtcaaatccaacaggagctccacattatgatgaaccaggcctctaaaatggaaaaaccccaactgcataacatcaaattttagctctagaaacacctgctggttgaaggaaataaaaatattttaacccaaagtatagtagtatagttccttgacaaattttgaggtggctgatagagggtcagcaaacagaagtggccctgcagagctgtctctcatgggaaaatttacatctgtagagaatctttattaatgcaggcaggtcttcctttatctggatctgggaaaattcttttttttttttttttattgatcattcttgggtgtttctcgcagagggggatttggcagggtcataggacaatagtggagggaaggtcagcagataaacaagtgaacaaaggtctctggttttcctaggcagaggaccctgcagccttccgcagtgtttgtgtccctgggtacttgagattagggagtggtgatgattcttaacgagcaagccgccttcaagcatctgtttaacaaagcacatcttgcaccgcccttaatccatttaaccctgagtggacacagcacatgtttcagagagcacagggttgggggtaaggttaccgatcaacaggatcccaaggcagaagaatttttcttagtacagaacaaaatgaaaagtctcccatgtctacttctttctacacagacacggcaaccatccgatttctcaatcttttccccacctttcccccctttctattccacaaaaccgccattgtcatcccggcccgttctcaatgagctgttgggtacacctcccagacggggtggctggccgggcagaggggcccctcacttcccagtaggggcggccgggcagaggcgcccctcacctcccggatggggcggctggccgggcggggggctgacccccctcacctccctcccggacggggcggctggccgggcggggggctgaccccccacctccctcccggacggggtggctggccgggcggggggctgacccccccacctccctcctggacggggcggctggccgggcggggggctgacccccccacctccctcccagatggggtggctggcctggcgggggctgacccccacctccctcccggatggggtggctgccgggcggagatgctcctcacttcccagacggggcggctgctgggcggaggggctcctcacttctcagacggggtggccgggcagagatgctcctcacgtcccagacggggtcgcggtggggcagaggcgctcctcacatcccagacggggtggcggggcagaggtgctccccacatctcagatgatgggcggccaggcagaggcgctcctcacttcctagatgggatggcggccgggcagagacgctcctcactttccagactgggcagccaggcagaggggctcctcacgtcccagacgatgggcggctgggcagagacgctcttcacttcccagacggggtggcggccgggcagaggctgcattctcggcactttgggaggccaaggcaggcggctgggaggtggaggttgtagcgagccgcgatcacgccactgcactccagcctgggcaccattgagcactgagtgaaccagactccttctgcaatcccggcacctcgggaggccgaggctggcggatcactcgcggttaggagctggagaccagcccggccaacacagcgaaaccccgtctccaccaaaaaagtacgaaaaccagtcaggcctggcggtgcgtgcctgtaatcgcaggcactcggcaggctgaggcaggagaatcaggcagggaggttgcagtgagccgagatggcagcagtacagtccagcttcggctgggcatcagagggagaccgtggaaagagagggagagggagaccatggggagagggagagggagagggagaggccaactgaatcttctaacttatatatcaaaaagaaatatttaccatccattctctaggagggctgccacctacaaggtttcatttacataacaagaccagctttgctagaaaaaaacagtttttctttcatctataacttgtcttgccactgaaacctgatttaccatcataacctgtttttggccatgcaggaatgcaagaaaataatcagccagcaaaacagtaagaatttattacactcaaggctgctggcttctgtccgtgcaatctttttaatcagatggtaaaaatcagcgtttcttccactacattttgattaatgggaatggaagatttgtttatgactagtcttcatgtagtgactctggtatactttttagtaatttttgggtgtgaatattcatattgtttaatcccttttttcccagaggtagtcttgctaactaagctctgatctttttatcttgcccaaattcctatctaagtggtctgggaagtcataccctacaaaccataaattctcagcagatgggtttcatttaaccctaaatatcatgacttactttccagtctgactctggcataacattatgtgacaaagaagatcaaaatattttaccccaaaacatgtttctttgccatgttttgaaatggtcctgcaaagctgtcctttgtggaggaaaatgtgcatctgtaaagaatctctgttaacatagctaggtcttcttcttccaggccctcccaatcctgaagaaattcggtaagagcctaccacctttttgaaggtctgaataggaaacatttgtcatctgctgtctctaagggcagccactataagacttcaaaagaaccttggtctccacaattttttatctcaacctgaacatttcctttctattgatccaaggtatttagacaaactcaaccaactgtccatcagaaaatgtttaaatttacttgtagcctggaagtccccactttgaattgtcccacctttctgaaccaaaccaatatatttcttaaatgtatttgattgatgtctcatgcctccctaaaatgtatagaaccaagccgcaccccgaccaccttgggcacaggttctcaggacctactgagggctgggtcacgggccatggtcactcatatttggctcagactaaatctcctcaaatactttacagagtttggctcttttcgtcgacagtcttttccttcatctcttttcttctgtgttgttcatgaagtggggtactggataaagtttccttgtcatattccttgtctcatcttgtcatatgcccttgagggcttgatttgtgaccaagtgggagcactcattcttggtctccattatcagcagtgtgtgatttttgagtcacattaggtgaccagccttaaaatggttgggaacccgagattttttgttttgttttgtttgttccaaatgtgtcaagctcccaggagggcttgtcataagaagtcccatccataaggggcttttgtcattccaacttctgttgtctggatagggctgtggcaacaagagtcttttgctatcctagcctattgctgggagtgaatattttattttgttggggttgggggaaagacctctacaattgcttcttcattgaagagggctattgacttgagggctatttagaatcaatataccactggaaattctaattgtctatggccagaagatggattcctgaaatcagactcctatgttaaaagtattttagagatctcttattctaaacagttggtaggaggatcaaatttcaaagaaagacacgtaatcgtgttctggctagccttaaaaattctcttgactaaatttcagagcaaaaatctgacctaaaacaaagttaaatttttttgtaagctcaaactgcttgctttagatcccctgagggagtaagaataaaagccactccaatattccatttcatggaatagttaaaattccatgctttcactcctgacctggattttgtttcaagtcaaggaaccagcctcttttgttttgatatttatgtgatttttgactttttaaggtactcatttacctctttggagatgcctcatacatccttggctaagtcttggctaagtcgtaatcttgattaaggcttattagtttcagatgggaggatacttttggtaaaaaagtttcaaaaaccagaagtttcacctgtttgtcctagctaaaatctgatagtaagaaatctgaaagtgttacatgtatttagtcagacatgagcagggcaggagagagcctcccgtcccccgcatcaggactatcaggtgactattaggtgatggtcaggcagttgttaactgtctttctaaaataataattggccacagccagtgccagaaaaaggcagtctcccaatacataggaaacacctgaaactggtgattagcagcttcccgataagttctcagaagttgggtgagtgggctcaagcatgtgcattaagaggcaaaattgcagagtttaattggtatatgaccttccagggacctttgactggtaagggaagaaagcctcaagtgatcatgcgcacagctccagtaaacacactgcacatgctcctctccgaagtgctggcaggccactgtgcgtgccgacagcccactccaaggaaagaatcaggggaggagagatgcagaccccagaattagtccaacatacaaaagcctaagtcaaatgtcaaacctcatacttgatctcttgtcacctgcttagccctcttttaagcgtactttacttcctttaatttctgctctaaacctttttaataaaacttcactcctgctataaaagttgcctcagtctctgcttctgccttatgccccttagtcaaattctttcttctgaagaggcaagaattgaggttgctataggcttgtacagatttgctgctgctaatattctttggtgccatgactcagctacatttggctgctaagcaaagaatttttaaaaagagctctattgttaaaagtcagcttaattaaaagctgattttcaagccatatatttattttatattaaatatatatcttcatatagaatatatattcctatagaatatatataggatatgtagatattcctatagaatgtatgtataggatatatagatattcctatagaatgtatgtataggatatagatattcctatagaatatataggatatatatattcatattgtatatacattcagaaagggcttgaaggcctcaaggcctttctgcttttcttttttgtatctttaaaagtttttttccagttgactgaaatctttcaaaatcatatacttagtctctctgtttctttctcaaggattctttttcagttcctttctgttcctcctttcttttgctacccttgatgctacatgaggggacctaaagaatttctaacagcctggtaccccttaaagaaaacagaaaagatgccacagactcccctgtttggaaagaaccacagtttttcctcatggaatcccaagagttgtaagtgaatggattcctctcaggtctaaaactctgctctcttttcaactgtgttgactgacctttttggcttctgggggatcagagtttactttttgttttcctttttttttttttttaatgagatggagtctctctctgtcgcccaggctggagtgcaatggcacgatctcagctcactgagacctctgcctctcaggttcaagcgattctcctgcctcagcctcccaagtagctgggactacaggcacatgccaccacacccggctaatttttgtgtttttagtgtatttttagtagagacagggtttcaccatgttggtcaggctggtctcaaacttctgacctcatgatccgcccaactcagcctcccaaagtgctgggattacagacttgagccactgtgcccggctcagagtttactttgtactgtaaaaagactcgaccttccttgtgtaatggctgctgggtcagtggtaagagctatggtttttgaggtaactaacagtggttagtcagtgattattacttcagagggctactcatctctttgcatgtttagataagaaagacatggtttaaacaactagaaaaagtccattttggcaaagtacactatggaagtgtttcacagtatgatccccatggcatattcctcttcttagggacgcgggattcagtgaaatccttgagttttaaaagtctagatgctgtcccttacaactgggtctccctttacacattgaaattattaagatctaaaaattacaaatacttcgttggccctcttctttaatgcgctcctctccaagctccctggaccagttggaaaacggagaccaaattaaaatctacatatctaaataaaatttatctccttataaaatcctatggtaaatttttatcattttggtgttaccttggcatctatttttaatcttccttgaacacacccaaattccttcttgtaaaaccttaaattctcaatctctctgtgctttgaggtatacatttgctacccattttctaaaactcagtaaagccttcctcagataaatgttaaccttttccatttacaaaggcacaatttgaattcaactgtctttttaaaaatagtgagttttactggtcccatgtttaaactcctaaaatcaaaacactaacatctgtctccctctatgtttatgtggacatgtatatatgttgtatcacatatgtgtatatgtctatacatatgtttattatttacacatggtatcaaattaatgtaaagataaatgagtactcataaattaagtaaataagctcaaatgcttttttcaatacatgtaattatagtaatcttttataaatatagttttaaaattattggtagaatgaagtagaaatgtcttaaaacaccttgaacatttaacaaccttcccaaaatcaaacttcagtttcaaaattgtcttccatggcacctggcttttcaaatatttcagatggcccctgaagtgtccaggaaagagaggtaaataggattatttgagatgtttaggtacatgggattgccaaaatgatgctcaatcttttttagattatatcttggtgaataatgctaatatatgttccaacattgtatgggatttctaaaattctaatgtctgagtatatgctatcaataataattaaggttttttttttttctttttagacggagtcttgctctgttgcccaggctggagtgcagtggcatgatcttggctcactgcaacctctgcctcctggtttaagtaattctcctgcctctacctcctgagtagctggaactacaggcacgtaccaccacgcccggctaattttttgtatttttaatagagacggggtttcactgtgttagccaggatgttgatctcctgacctcatgatccactcacctctgcctcccaaagtgctgggattacattcatgagccactgcgtgattgtgtttctaactgtaactaccctggacattttgctattcacagacaattgttatcttgttttaatccttttcaaagatggtttataatgagctatagaactttaacaggcactctcaaatacaagcttctgataactttggagatcataacattggaataaaggaaaatgtacaggactcataaagagcttaaatgttcaagaatatcaagcaaaacaagagttaactaaatgaactgaactcagaaagctgaagcaacatttgtttggaatattttgctgattcttgttttgcttttcagagtcaagaaaacttatttggaattatttacagcttttaacaattaagtaaggtatacacttctgtgatcaagatttggagcctgtttgtttctctctgcctggttcctctaaaatttggaaactatctgtgagtattcctatggcaatacagttgtttgaatcagtgcaataagaattcatttttcttttgcaacaggacacaattggagaaagtgattattttaccaaggctttgactggaaggctatgcttcccttgaaggagtcagtcttcacttggagaaccaataaaagccccaggaggagactggcctcatacccttgtttacacggtccctgtacagggttcatgacttatggtcagtaaagaatgtcactttctaacaggtccaggagttccaagtttattatgtgactttaagaggagaggatcacccaactcggggttatttaaggatgcaaacctatggctgggcttagctttaaaaggtcttatctgcaggaggctgaggcaggagaatggcatgaacccgggaggcggagcttgcagtgagccgagatcgcgccactgcactccagcctgggcgacagagcacaactctgtctcaaaaaaaaaaaaaaaaaaaagtctcatctgagattccttggggaacagagttccatcaaaatcaatccaaaaggcctatgtagaaataattattcttggccaggtacagtggctcacgcctgtaatcccagcactttgggaggccaaggcgtgtggatcatgaggtcaggagatcaagaccatcctggctaacacggtgaaacactgtctctactaaaaatacaaaaaattagctgggcatagtggcatgcgcctgtagtcccagctgctcaggaggctgaggcaggtgaatcgcttgaacccaggaggcggaggttgcagtgagtcgagatcgcgccactgcactccagcctgggtgacagagcgagactccatctcaaaaaacaaaaaaaaaaaaagaaaaaaagaaaaagaaatacttattcttgaaataaaagcttaacaaggttttcctgaggtgctaatctgttctttggcaaaatttctaaagggttataaaaggcttttgcttctttaaaatttatgagtcatcatttttggcaaaataaataacatagtaatctggaattctatttcataataacataatgaatatttcataaaatcttattaatcaagtattatgaatatcataatatttcataaaatcacacaggaagcattgtcacatatgaaatggtgttttgctttctttgggctatatttgtataaatatgttattggtatgtgttctaaagttatggaagactcctataattctgatatatcttagtgtacattataagtaataattattattgttatgttaaattattgtgtgacacagagttaacagatttccttgtcagttgtgtctttaactatggctaccctaaaactttttgtcatccacaaacagttgtcttgttttggtcctctttaaaaggtgattttataatcagctataaaggtctaacaggtgctcttgaatgcaggtttctgataagtttggagataagatggtgacatcagaatagaggaaaaacgttcagaactcttgaagagctaaaatgttcattaatatcaagcaggacaggaattaactgcgtgaactgaaataatagcagactggagtgatctttttaatgttttgctgaaaacattgctaatcctttgttttgctgttcagagtcaaagaaacttctcttttaagctattgacagtttttaacaatttagcatactcccatgaataaaatttggagcatatttgtttctctctacctgattttctcaataatttggaaactatctctgagtattcttaagttatggcaatatagttatttgcataagtgcaataagaatctgtcttcttttgtaacaggacacaattggaaaaactggttatttttaccaaggctttgactggaatggtagattcctttaagtaatcaaacttgacttcataggtggggctcgagcgttcattttgaaaaatgtttctgagtgattccaatgtgtagctatatttcccatcagatttatctgaatttttgtggcattcgctcctttcttttttggtattataattatttttcaggtcttatctcctctcttgggttttatgttccctggggtagggaccttgccttcttcatttctgtatctttcatgaacacatgaattggtcatcaggaaaaggttctcaaccacatgttggttgtgttctgagtctcagctttacacattagtgctagcgtcattgttctccatgagatcagaggttgcttgtgatgaaggttgtgggtaagtctgcagtgcagatggtggaggagagataccctgtttttgtatatagcattggaactaagaatattatttatatatggggtggagagtcagggatgtgtaggaagacagttctaattaggatggaggaattatactagggaattatactagggaatagatgaagtaaaggaagtaagaagtattagtaaagagaagaaatgagaacttatcaaattggccagagtagacccctgtagattcttgattaggtgaattaactagattttaggaaggtaatgagacagtcatatgcaaggaagatttcaaagtctggagacaagaagtcaagcaggacttcgagcagttgttgaggtttatgggaatggagagaatgacacaagtgagagatgttaaaaaaggatcaagagtctttggcaatgtactgaatctgagaaatgaatgagtggaggctggggataattacatttaaaagacagtgggggtacagggagcataaagaccagggagaagacctacaggaattagtgctgagaaacaagattggtggaaggaggagtagatccactcccagatacaggcaaagaagttctctccctctcccaagcatggcagtcatccttggagtaaacaggacaagaggaaaggccatcatacttgccagtcttagtgaaatgcagaaactacacctgggttgctatattagagccaccccagccagtactccagtcatgatgccgacagtgatcccagctgagaggccaggagaacttccttatcctgaagcagctgtcatggaaagaaaagaagagaataaatgaaggtgatgttattttacagtggagtgccccaggagccaactctcaggatgaagtaatttctacttgtttcttcaaggaatacattatttttgtgggaaagttgctgggaggtggttagccaactatatccttgaaatttgtcttcttctcactgtttctatgttggccatcagtcttctgtcaattctgtcctggcctttctgcactcagatatttttgaaggctttgggatatgagaaaagctgattgctattttctacatcattagaactttccaccttttcatgattgcatctttttttctcagtgtctcagtttgggcaggcatgaattagaccctgtcagatctctatggcagggacttgattgacagaaggttcaggtcagcgcattccaaattcacccactcctttgcacagagaccttgcttctcagggactcccagcaggggtatgaaagcaagcccagttctgtgagactttgttttattctcatgtgtgactggttggaggactccccatcagccttgctgaaactctcttagaactgccttgatacctaaaacttctttgtctttctccttcacaggaatcaggtctgcatcatggtctgagggctttcccaggctccttccatgcctgccccactttccctcacctgcatttttcctaataaattatcttgcatatctaatcccatcttggctgcatctcagtgggtaaaaatgaacataccaggcttgattgtttgcacttagcttttgttctttctctcccacatgtagtcagtaaccatgttctagtgttttctgtgttacctgtgcttccatatacgtatatatatgtgtgtgtgtgtgtgtgtgtgtatttacataaaataccttgtctacacacacacacacacaaacacatacacacacgcaataccttttgcatctgtttctttatttctgttgcaagcatttacttttagccctcactagtcaactcaggctggtgattaatgctatgttagttacggttgaggggcacctcctatatgccaggccctgtggtaaatactttacctgtatattatttgatttgtacaataaacctgtcaggtagacattgtttccattttacagacgaaaagctggaggcttagagtggtgaagaaactttcctgatgtcatatggctagtgaaaggcgaatctgagatttgactctaggcctcacttcaaggctaatattaatagtagtaataaagcaggtaacatttataagacatttcctctgcattttatggaaggtttcattgataattacattaaacctttagaacaatactatgaagcaagcactttcattgcaaatttcagttgaggaatcagaggctcagagaagttaaaaatcttgtacaagaaatttataactgtaaactcttacattagaaaagaagaaagatctcaaatcaacaacataatttacaacttcaggatataggagaagaacaaactaaacccagccatagtgaatgaaaaaaataataaggattagagtgaatataaataaaatggagaataaaaaaatggaagagattaatgaaaccaaaattggttcttcaaaataagatcaacaaaactgacaaccattaacttgattgactgagaaaaaagagagaagatttaaattactaaaatcggaaatgaaaatggagtctgggcatggtggctcatattttaattctagcactttcagaggtgtgtgggaggatcacttaaggccaggagttcatgaccaggctgggaaacacatgaatatccagtctgtataaaaaattcaaaacataatttgcagggcatagtggcatgcacctctagtcccagctacttgggaggctgaagaaaaaagattgcatgagcccaagaggttgaggctgtagtgacccatgattgtgcctctgcattccagcctgggctggcctatagagtgagaccctgtctctcttaggagacattactaccaattctaaagaaataatgattacaaaagtactgtgaataatgtatgccaataaattatataacctagatgaaatggacaaatttctggaaacacacaagaaaacccgagtagacatacaattagtaataagattgaaccaataaaagcatttgacaaaattcaatattctttcataataaaaacattctaactataaatggaaggaaaccacctcaacatagtaaaggtaatatgtgaaaagcccaatgctaacatcatacttaagggagaaagagtgtaagttttttctgtattatcagaaacaaggcaatgattcctgctttatctactttcattaaacatagtattgaaagtcctagtcagaaaaattagacaaggaagaaaaaagacattcacattggaaaggagtagaattatctctgtttgcagataacttgaatgtacatctagaaaactctgaagatagaaaaaaccattagaattaataaatcaattcaacaatattgcgggattcaaaatcaacgtgaaaacattagttatatttctataaactaacaataaaccatctgaaaggaaattaaaaaaaatttcaattcacattaacatcaaaaagaataaaatatttataagtttaagcaaggaggtgaaagaattctaccctgaaaactacaaaatattgctgaaagaaattaaaaatgacatcagtaaatggaaagacactttgttttcatggactagaagactcaacattgttaggaggacaatactatccaaaaacgtcagattcaaagaaatttatatcagaatcccagtaacattatttgtagaaacagaaaaatctatcctaaaattcatatggagtctcagggctctaaatagccaaacaattctgaaaatgaagagcaaaggcaaagtactcatactttctgatttcagcatttactacaaagccacagtaatcaatacagtgtgctgctggcataaaggaggacatagaaaccaatggcatagaatagagatcccagaaagaaatgcttgcatatatggccaaatgattatcaacaaggctgccaagaccattcaatggaaaaaggacagtcttttcaacaaatgatattggacaagctggatagcaatgggcaagaatgagtggaacctttatctaacaccatgtacaaaaattaacccacagtggatcaaagacctaaatgtcatagcaaaaataaaactcttagaagaaaacataggggaaaagctacatgacattggatttcacaatgattttttggttataacaacaaaagcataggcaactaaaaaaatgggtaaattggacttcatgaaaattaaaaacttttatatatcaaagaacattatcaagaaagtgaaatgaaaaggcaacccatgaagtgggaaaaatatttgtaaatcatatatctgataaggaattaatttccagaatatatgaagaactactacaaatgaacaacagcaaaaatccaaaaacccgattaaaaaatggacaaaggactaaaatagagatttctccaaggaagatatacaaatggccaataagcacatgcgaagatgctcaacatcactaatacttagggatatgcaaattaaaaccacaaggatgcaccacctcacacacattaggatagctttgataaaacaacagcaacaacaccaccaccacaaaacaagtgttttcaagtaggtgcaaaaattgaagctctattgcattgctgatggcaatgtaaaatgttatactgctgtggaaaatggtatggctgtttctcaaaaaattaaagaattaccatttgatccagcagttctgcttctggacatatacccaaagaactgaaaggaatttgaacagatatttgtacactgatgttcacagcagcatcactgacaacagccaacaggttgttgtgatgaactgaactgaaaagttaattgaaagataagtgcatagaaaactgaggtatatccatacactggaatgttattcaatcttaacaaggaatacaattcagatacgttgtgcaaaatgaaggaaccttgaagacatttatgctaagtgaaataagccagacacaaaaggacaattattagataatttcatttgtaggtggctgacgcctgtaatcccaacactttgggaggctaaggcaggcggatcacttgaggttaggagttcaagaacagcctggcccgcatgttgaaacccagtctctactaaaaatacaaaaattagccaggcatggtggtgtgtgcctataatcccagctactcaggaggcttaagcacgagaatcgcttgaacctgggaagcagaggttgtggtgagccaagattatgccactgcactcaagcctgggcgacagacccttactcttaagggtctgtcttcaaaagaaaagaaaagaaaaagatagaatagccaattacattgagacagaaagtagaatgatggttaccaagggttagggggagaaggagtgagagtttctgtttattgggtacagaggtttagtatggtgagatgaaaaagttctggaaatggatagtgtgatggttacacaacactaaattgcacacttagaaatagttaatggtaagtcttacatcgggtatacagtggctggtagtcttaccctctataaatacacactttttggtactgccctttccctcccatgcatctctgtgtgtctccaagtgtgcatcactcactgtcctctgtgctttgtcccatgtgctgtgctcacagcctcatacagccagtgacttcagaaccaggacacagctcaggagtctgccccaaggctccttttcttcccatttttctacatcctcacctaggggaaaactttgcttccactggcagctcagtttagccagattccagacaggccacctgggcaccttcttgacacaccccagccccaccccaggtagagtcagggcaaggccagtcacagctgggagcagagtctcagctactccttcctcatctgaggggctttcttctctcatttgagggaaaaatgtgagcttgtttcaagccttggatgttccctgcagctcaagtgtgggtaaaagtaaacgaaggggtgcacagaaaaggatgtgttggtaaaatagagaagaaacttgaccttgaggaccctccttcttccctctctgtaaagctccttccactacattgggcttggggctgatgaagcctccttcctacgtttctcaggctggacctgagttcatccgtgagaaatcagtaaaacaaaaggaagagtctgtagagatgaattgggaggggtcaggagaaaaatttgggatttgcttgtgcccatgggacacaggctgggaataaaaatgttttcctggttcttctcagaaagccaaatagacttcacctgaaaacctgttgccagtgctccccttaccagtgactgtgatcttcttgatcgtgaaacacctgctgtcagtggctgagttgcgaacgaaacagatgtagattccactattctttttagtgattttggagataaagagctcttgtgctgatttttggaacttcccattaatctgccaagaatactgtgggggtgggttagaggctgtgttgcaggagaggttgaggttttcccctggatggtaataggagtaagagggggaaatgttggggtcgtctgggccatctggagcaaagaaaatagagccaaaagtcatgtcatcagagggaaggaaaagctcctggtctgtggaagagccacagtgtccctctgagccaagtcacaaccctgaagtcccagccaaacccccgctgtggtcactgagccagagtctgagaattcacctgtttctcccattacaagctgtggaccctgaggtctcccatgacaggagcagcccctccccttggattcatggtcaaggctggacctacccaggtttgcctggggcaggaagtcatggccagcctgggtgcccaggagtaaaggtctctgtacttggacctgagagggactgagaggcctggcctctggccatgtggatttgggctggcagcctgggctacagaggaacagaagatactacagaggacattcagggtgactgggtcactgtggttggcactcactagattccggatttcacattcatatgttcctgcgtccttccttgtgactctgggtagagtgagggtcctgttgtcattggacagcttcagcctgggactgaccgggaggctctgaccatttacccaccacaggtaagttgtgttctgaatctcagtttcacaggttaaggccgcagtatcctcattctccacggggttggagttgctgatggtgacgaagggcttggatagtttcgctgtgcagaaaacagaagattgccctgtgtggcaacttttatcgctccatggacactttttgatcagagttggaatttcctgtctctcagcccaattgagtccttgaaagcccatggcaggtgtgtatgtcagaaaacagatgcatggcaatctgagggctcagagaccatgaggccacctgttctgtcttagagaagcatagactttctgaagtgtaaattgagcagcagtgttgggtcatggactgacacatgaccaacagtcacagcccctggtgtctctcctggtttctccctgtccagctgactggctggcccaacttagggtcctcacctggaacgtgcagctgctgggccccttccagcttcagttctactttgccctcctaggtgtgttttctctgtgacttctctttcaagaacatcctagagatgggtgttgatagactttccattgtccttaaaccctgtggatactgggtagcctggcctggaactagatgttttcagcagaaataacacaggggagaccaggggcaagcctgaagatcagtttggtcttcaggcagtggagccacaagtcagggcagttttcctgagatgtttcatagtgactgacttgagccagtgacccctaaagatagaggagagtctaaggaatgatctagaaaaagtgaagagaacagaaaagagctggtagctttggatcagaatcacgttccctgtcctgggtccttgatgctttctctccccctgcaggtgaggaccatgtggatctttctagaaatatatgtagacattcgcaaatgcagaattgactggaggaaaaggggagcataaaatgctggaaatctggccctcatagatcatgtttatttggtggatatgagacagaaatttgggaagaagttttgcaaatgttttctctgattggacattctactctctgattccatgagtttgactaccctagggacctcatataagtggattccagagtacacttctattatgatttgtttttaataaatggggtctggagagagaaaaattatgctttaaaagaaattctatagtacatctgttgttggttgttcttgagttttattctgcagtttggaccaaatcatagattcttagtgggcttcaggttcccaaactaaagctttcaaaactttacctttaaaattgggaattgtactcttcatcctagtagtcattatttaccttatactatgctgttaacttaaatactgaaactgtaaatgagagtactaatgccttggtcatgcaagccttggagctttagcgtggctcacatgagtatgcttagacagctgcaaagtggtttcactcctctcaccttgggatcaactcccattcccactatgtcccctgtcagcaggaagccagagcaattgatgacctttttctatcttcatagcctacaccttaatcttaaagtgtcttaaaactcagaggaagggattgaagatgcctttgcaaagttatgactgaaacagtgaaagagatctaactgaatcaaccccatcttgcttctgacctttaagctgttcgtgttccttcctgggtataggcagaaccactttgggaggaacttggtttatagtttaaaacaagatgataacagctctttccccaaacaaacctccctcttgcctagggactagaatgcctttgtaggactaacaaccacaagattagaaattatggtttaggagtcacacagctggaggctacaagattttgaccctcatgtcagtgcttgaggtattttgcagaccctgcccttggtggatcagctggcaccaaccagatcaataaactggctcatctgaccttgtggcccccatgcaggaactgactcagcacaagaggacagcttcaactttccatgatttcacctctgacccaaccaatcagcactcttgactcacttgccttctcccactcaccaaattatctttaaaatctctgatgcccgaatgctcagagacttatttgagtactaataaaactctggtctcctgcacagccagttctatatgaattactctttctctactgccaatccattgtcttgataaattgtctctgtctaggcagtgggcaaggtgaacccactgggtggttacaaattgagcccatgagctttggggactgcagacctgtgcttctgactctaactccgtggtgagtcagtgtagaaactgaaaccacctttgtaaagattatgacagtgagagcaagctagcatggctgactccatctagcctctagcttcaggctggccatcctcattaattcccaggcataggccaggctaaccatgggaagaatttgtagtttaactttgaagcaatgatgataatagtcccccttaaaatttaccccctccttgctcagggactgcctttgtaaaactaatgaaagaccatgagattaagattattggagggtcccaaattttgctaaaatgtaggcatagtttctgcaattccttactgctcaggactcatgtgtacagaggtcacaagatttatgacttccttaattgcttctatagataacatcactattgtagaacctgagattggtcttttaagatgttcctcagacttttgcattttggcaaccagcataactcatccagacccatgattaatgattcatccattcatgtggcttccatccagaggcagatttaacacaaacagatcattttccccacctgcatgatttcatccccaaccagtcagcagtactcattccttagacctctgcagctgaaactatccttgaaaacctctaatttctgagccactagagaggctaatttgtacaataataaacttctgtcctcctgtttgacagtctttgcctaactaaaatcttttgtaactgcaagtcaccatctcagtaaattggttttgtctgtgcagggtgcaagaggaacccatcaggtgattataagagtggactgaggagttgctcatttctttccagtggcttgtttcatgttttggctcacggaggaagagaaccctggatggggacacagtggaagcttgttctcctggtgatctggggatattggctcatgatggagcctggcaggggtgactgctctggctgatttctgtgcctttcctattgtccaggaggtgggccaggctacagtgtgaataggaagggaacagaacagtcagccttgttagagggagtgtctggggaaggcctacgtgtgggggaagctgtgcagggtgcagtatcgtagctggaatgaagggggaggaaaatgagggacatggaggagcagagacacccatggcagtgagcagtgggggctacagtgacctaaaagacctcaaggtccaggggcccccacttccttagtccaggaccagggagccctggaaacccttctatgcccagggagcctcagtgtcacatgagatggggtggctttaggagtaggggttcatagggatagaacatgggtctcaggccctgaaggacagaaaaccagtgtggacagaaactcctaggattctgtatccagaatcaggtatctaaagaggttatagattattcattccttcattcattccctccctccttcacgagaaagcttctgagtgtgtatgttacattgggcctgtgctgctgcagggtgccagtggggagagaaagctatgacctctcttttatcctcccatgggagtgacaccaacacattgggatacaagatttcaggtccagtgaggggcattaggatctgagggggaggactggatattccttgcactgactttgatcattgaggcaggcaatttagttctggagtaaaaacttatcagttgtccatttgctctcactcctctgaggtctagataagcatgaagaaaggatttgagccaatggatgactgtggggtccccaggacccccaaatccccacttctggtggaggagaggatggggctgtggctgcagccagacctctagtgactctgatctgccacttgtgtttgtgtgaccctggttcagtgactatgcctccctgtgtctcagttttctcccagtcagataagctaaatggcaaatggtctgtggcttgtcatgttgtctgtgaatgaagtttaaattattcacagtcacctgacctaatgcttggcacagaggacgtgttcacacaaacaatgtttattattatttgcctgcatgaaagagcatatctaggcctgatccatgatgaacaagatgctaccaggaacatcttctctcttctgtttctgcccctgaagacattgaattatctacggagtctcttaagtctcccagggcagttggctgatggcctaagaagcttgtccatctgtcctctgcactctgagtctcaggtgaaggactaggctctgtccatgcccagatgaggctctgggtgctgagccctggctgttaaacagctccaggaaccatggcccttgtacagctggtaaacctttgctcccagtcagccctgcccaggaggccacaacctaaccctggcacacattcccgagggtcacatgaagtcaggattctgggaccgggttctggggctgaggcttccagggttgaacttctctaagagaatccccgagggccccccaggccaggccctgacccagttctccaaggaatttctcagggtcatgtccatggggaaggcacggagtgcttggctgagactgttctccacctgctgtgtccctcccatcagactgtccttcctctgcagtgaatgtctgcagggtctggatttggggaaacaattttgatctgcagatgtttgtctcccctgtgtgtgtcctgcactaaatgctcaaaccctaaaatgggacataatgcagagggctacacaggcacagtccaggtctaacagtcctgtgtgtttgaagtagaactgacccccgacacccagaagtcatgaggaatcactcacggtgtacgctgatctgtgcagttactttttcagtcataagatctgcctttaaaatttgcacggtgtaggatcctgagtcattcagggcgatgttccagatctccaggcgtgctttggggtatactgtctcttggccactgtatgcaggccctgggatagttacttcattgtgtattacatatcttgcaattcagtcgtcggcatctattgtttcccctttgtaccagttgtggccaagtatatcctggggcagattgtagacaagtagaacaacctccttctcctctaccgcattagatggcagaacttcaactgtaacttgggcagtggtgggtgggttccagaaggtgaaaagtgaggctaggagagagagagagagcatcagtcaacattgggacctatgtattgggggggaaagatggggccctgtgtcctgagaaggtctcttcacccctcagcctttgagtatgtatgtgtgtgtgtgtcctactgagtcaaggttagcagcatgatccccattccttcaacatctctgaccttggcattttcctgtttggaatcctcttccccaggggtctgctcggccccctccccactgccctcaggtcctgctcacatcaggcatccttgggagactcttcccctgacacctcctctagagaccctgggtcttcccttgctgacctttccctgttctgtttactccacaactcctgtcaacacctgacctcacattctagatctctttgcatgtctgtcttccttcccatgaaagcatgagctctgtgagagcagggtcttgtgtgatcttggttgcacctcagttcctgggacaggctgcagactcctgtggatgagctcatgagcgttcccaaggtcttccatgtcctggaccaatttctgaggttggaggctgaggataatgtttcatgccctggttatgtttttatttgaagtgtcatctgatatagttattattatcatttttcaaaatttagtggccagtgatgattaaccaggaaaacagaatacttaagattttcctacctcttaccagttccagttttatatgattttcctgttgtgacccctgttcctctctggtgtcctctcccgtatccaggctccaacagaagccctcagtccccgctcagagctctgtcctccccaggagaccccagccagtcactctgcttcctccttgtgttcactcccagaaagttctctcttcacctgtgagcaggagcccctgtcaggggatgcgctgtgtgcagggaggggctgagaggggcctcatggcttgtgctgcctgtgtgttctcttctgtggaggtgagcctgggatccggaaactttctgagcatggttgtcagctgtgctgtgcttcctccttctgcgctgagcctcttcccagggcaggagcgcctctcaggctcatggttggggtctgtgcccaggacacctctctgtcccctcccctctcagtcctgcctccctgtctcttttctacctttctcttctgtctgtgtttcaggcccctgggaattgctgaggcctctgcctccttcagcagtgattctctcacccaacctctacacatgctatgtgcagacacacagacacacacacaaagagacacacagatacacatagtcacacagaaaccctgtagtttgggtgagcccagttctgggtcctcagcatccagccatgtttatggctccaggtcagcctgcacagttaccccttctgccctcttccatccccacctggctcttccgttcagagcaggaggcttggactgcaccagggccctgtcacagggatctaccctcactgtgctttgggtgagctgagtgctggctggtgagagggaccctttttctcattgtgtcaatattggctacagtttccaaggatggacattcaatgacccgggtgtcccagaagagactgtccttcctggaggtgtgcaggatgaatctctcatgccttctgggaagagaggcctctgctggttggtcagtgggggctgtggtcccaggaactggtctcagccactctcttgcaccctgggttctggttgctgagctggggctgaggcccattcatgttttctctgactatctttggtgtcccgtcatctgcccagctgactgtcctgtggtcactccaccttccccaaggctgatgcagcagggagtagggggctgcccagggacttcacaggacatggctctctgagacccaggacagagaacctgggacagagcaggggctcagagctgaagacattcaatctgacttactctgtggccaggatgggctcagccctccctgtgctgacattccctggggtctgtcctgagggttttgaccttgtcaaggccctcagtgtagaggaagaacaggcagtggcagcagaccccatgtgggggtcactgctcacacctgagagggcagatggggtggaattttgggatggattcatatttaaggaatgatccaacagtagacaattttgaaaatgtacagaaattcctatgctataagtttattctgcataaggtattttttcttaataagataattgacttttcattcatagatagctaatatggcctaaaatggtgagaacatcagagtggactgtttggtgtcttgtggtgtggtttcatgctttatttctcccaccccatatctacagaattctccatattccgttttgtaatgtaactcagtgggtgtcattctggtttgtggttacagaccattggaaaacccgtaccctctctgctgcgaggtacaggcagcaatgtggcatcagctctaaacatgctttctcccgtgacatcaaattgctgattaagtaaaagtcatttcaacagatactgaagatgtcagttgtacccctcacatactcacaattctttcaccaagagatgaaggattttactggtgagttgctttgagaggttagtgtagatctgattctgtcagggccacttttgccctctgagtgggcatttggcaaagtctggagaaattgttggttgacagaactgggggagggagtcctgtggcattgagtgggtagagttcccagagggtgctgaacaccctgctgctcacagagccccattagcatgaccacccctgtgtcaatgctgaggagtgcagaaccctgctgtgcccttctttagcttccctgggtcttccccagacctgatcctttcatctttctggactgctttcccatctcagctccctccttgcaccttagttccctccatctgaactcacacttagtccaaggccagccctgatctctcaactctcttggcccctttttgctccttagcaggagggaaccactagagggcaccctcaccattcctggagctcatgccctccctttcaattttgagacaaatatggctgcttttactgtcacaactccagccctccgcattctttagctttactcaggcagcagcacctggacaggcatcatggaccccagggaggactgtcactctggagattttggtggcatggactggagacctgaagccaccccaaggcccaagtcactggggagaggctgggtccaggtgagggagcttcacacttggtccagatgcccctgcctagtgtgggcactggggacatgtccatttgtctgtgtccctaaaggtcctgtcactcaggatctgtgcctgagggctttgacagagctgctgtggagctttccacatggggcctttcccagtggagcacgagtcctcccagggatttcaaggagggccgttgcctggaagaatcagaaggaatgtggcagccaccaggtgcaggctcctctcagggcctgaaaaaagggacctcttttcatcatttgccactcatgtctgcactgtctgcatcaggatggaatgatgtggaatttcatgcaaggtcattttgcttctgttctgctaataattttttttctagttaatcttttgaagtaaaggcaattgttgacttttgggtgttaaactcacctttcatttttggggaacaaactcaatgtggtaaatcctgacttttttggggtcatatttcatttgtggattttccctctctgttcccaagtagggcatgcagttttactttttcattgcatgatattcacctccctgtgtccatgtgttctcattgttcaactcccacttatgagtgagaacatgcggtgattcgttttctgttcctgtgttagtttgctgagaatgatggtttccagcttcatccatgtctcttcaaaggacatgaactcatctttttttatggatgcgtagtatttcatggtgtatatgtgccacattttctttatccagtctatcattgatgggcatttgggcatttgggttggtttcaagtctttgctattgagagtagtgcagcaataaacatatgtgtgcatgtgtctttatagtagaatgatttataatcctttgggtatatacccagtaatgggactgctgggtcaaatggtatttctggttctagatccttgaggaatcgccacaccatcttccacaatggttgagctaatttacactcccaccaacagtgtaaaagcattcctatttctccacatcctctccagcatctcttgtttcctgactttttaatgattaccattctaactggtgtgaaatggtatctcattgtggttttgatttacattcctttaatgaccagtgatgatgggatttttttcatatgtttgctggctgcataaatgtcttctttttagaagtgtctgttcgtatcctttgcccactttttgatggggttgtttgatttttttcttgtaatttgtttaagttctgtgtagattctggatattagccctttgtcagatggatagattgcaaaacttttctcctattctgtaggttgcctcttcactctgatgatagtttcttttgctgtgcagaagctctttagtttaattagatccaattggtcaattttggcttttgttgccattgcttttggtgatttagtcatgaagtctttgcccatgcctatgtcctgaatggtattgcctaggttttcttcttgggtttttacggttttaggtcttacgtttaagtctttaatccagcttgagttaatttttgtataagatgtaagggaggggtccagtttcagttttctgcatatggccagccagttttcccaataccatttattaaataggagctttcaaccctgccacagctgcgtttatacccattctttctcactgctaacgcagtttatttcttcttcttctattgctttgttgatgaattagtccagaagtttaaataaccttttgaatgctttgggtttttaaatttgtcttctagtttattattttctacctttaagtttcttacacttttattctacttgctttgtttttcactcacttcttatttggatgattaactcatttttaatcaatgttttcagtggaagcattttgggttgtgaattccctggggcatcactgtggctgcatcttacgacttttggtagatgtagctgttagtcaagtaccaggtacttaatatgttcatcactgtgtcttgattgacccgtgctttgaaaatccccagatgtctaatttttctaatttctaaaatttatgttatagcgattacatctagatcgaactgtatacaaaatatgtgcttgagtaaaaattattcaataatatctgctaatatatgagtaagcccagtcttcataaatgttccttgtggacttgaagagaacgtctatggtgcagggtatttggctgtagtgtgccatcgtcattgcctgttgattgtgtggttgaaatgtgtatcatttgtagagattaggcatgttccttgagtactgacaaagtctttaaagtgacttattgtggacaacatggacattcacagtgttaggtggataactagcaactgtcttgaacagaacaacatattcctggacatgttccaaatgaataaaacttaaatgtcaaatcaaagccaccaaagcacctcaaagtggggaaggactttgttattgtatagccaaggaagaaaagattgatacccatgaaaatttcgaaaagagtcttcacgtcaaaaaattctctttaaggaaaacaaatactatcttaaactatttgccattataataaacaggtaatgtgctattatataaaggatactcaaaattaacaagactaaagaatagcagaaggcaaatatatgaaaatcagttcacagaagaaatgttaatgctcactgttttcaagatcatgatgtttatttaacatattagagttcctagcctgaagcaataagaaatgaaagataaatcagtggtatgaggattaaaaaactagaaataaaaccatcattaatttcaaagaataacattgtttatatagaaagattcaaaatagtctaatggaaataattagaaataataagagagtttagggagctgagtagtataagaatagactaaaatatgttaatttaacaacaaacaactagatagtgtaattaaagagaacataatagtgccagagaatataaaatatttaggaatcaattcaaccaaaaccaaaatgcacacaatctcttcagacaaaattatagcaatcaagaaacactaaagcaggccttactaaatggagaactataccatatttatgcatcagaaaaataaattttctaaagatatcaattctgtttgaattgatgtattgattacatataaataggttcaccacattgattacaaatctctgaggccaaaaagttgtaaaactttccttttgtctcaacatttattttagattcagagggtgcatgtgcaggtttgttccctgggtatattgtgtgatgctgaggtttggggtacaaatggtgctctcatccaggtattgtgcatagcactgaacatttcgtttttcatttcttgcctgctttcttccctccccctttagtagttcctagcttctcctgttgccatttttaaaaaaaaattatttatttatttatttatttattgatcattcttgggtgtttctcgcagagggggatttggcagggccataggacaacagtggagggaaggtcagcagataaataagtgaacaaaggtctctggttttcttaggcagaggaccctgcggccttccgcagtgtttgtgtccctgggtacttgagattagggagtggtgatgactcttaaagagcatgctgacttcaagcatctgtttaacaaagcacatcttgcaccgcccttaatccattcaatcctgagtggacacagcacatgtttcagagagcacagggttgggggtaaggtcatagatcaacagcatcccaaggcagaagaacttttcttagtacagaataaaatgaagtctcccatgtctacttctttctacacagacacagcaacaacctgatttctctatcttttccccacctttcccccttttctactccacaaaaccgccatcgtcatcatggcctgttctcaatgagctgttgggtacacctcccagacggggtggtggccgggcagaggggctcctcacttcccagaaggggcggccaggcagaggcgccccccacctcccggacggggcggctggccgggcgggggctgaccccccacctccctcccggacggggcggctggccgggcaggggctgaccccccacctccctcccggatggggcggctggccgcgcggggggctgactcccccacctccctcccggacggggcagctggccgggcgggggctgaccccccacctcccttgcggacggggcggctggccgggcgggggctgccccccacctccctcccggacggggtggctgccgggcggagacgctcctcacttcccagacggggcggctgccgggtggaggggctcctcacttctcagacggggcggctgccaggcagagggtctcctcacttctcagatggggcggctgctgggcggaggggctcctcacttctcagacggggcggctgccaggcggaggggctccttacttctcagacggggcggctgccgggcggaggggctcctcacttctcagacagggtggccgggcagagacgctcctcacctcccagacggggtcgcagccgggcagaggcactcctcacatcccagatggggcggcggggcagaggcgctccccacatctcagacgatgggcggcagggcagagatgcttctcacttcctagatgggatggcggccaggaagaggcgctcctcacttcccagactgggcagccaggcagaggggctcctcacatcctagacgatgggcggccaggcagagacgctcctcacttcccagacggggtggcggccgggcagaggctgcaatctcggcactttgggaggccaaggcaggcggctgggaggtggaggttgtagcaagccgagatcaccattgagcactgagtgaacgagactccgtctgcaatcctggcacctcgggaggccgaggctggcggatcactcgcggctaggagctggagaccagcccggccaacacagagaaaccccgtctccaccaaaaaaatacgaaaaccagtcaggcgtggtggcgcgcgcctgcaatcgcaggcacttggcaggctgaggcaggagaatcaggcagggaggttgcagtgagccgagatggcagcagtacagtccagcttcggctgggcatcagagggagaccgtggaaagagagggagagggagaccgtggggaggtggagaggcagagggggtgttgccattttttatgtcattgaataccctatgtttagctccctcttatcaggttatggtttttagatttttcttccggtgttaatttgcttaggataatggtctccagctgtgaacatattgctgcaaaggaatgatttttttttcttttttaatgggtgcctagtattccatggtgtgtaggtagggattccttatctaatctactcttgatggacacctagattgatttaatgactcttagacatatgaacacaactcagcctcctatacacaggagaaatgaaatttgaggtccagggacagcaaatgttaaaatacaacctcagcctcaaatgtccccaaatacacatgtttgatcacataatgtgtgggagcaactgaggtgatagcaccatcccctacttttcttggaaacataaacattggtacacaccttgtggagtaaaatttctaaatgcatgtcaaaatttaaaatatatttctctttgcctcccaaacttcactgggaagaatttattacatttgcagtaatgaaaaatgacacctaatcatagttattcactgtagtgatggtttcacagcaaaatattgagaagaacctagattttacaccagtataatgctaattaaacaggttattttatatctacacaatggaatatgatacggctgtataaaaagtagaaaatcttttggctattcatatggaaacacctccatgttctgttctgattgtagcatataaacaacctaaaatgtgatgcattttttgaactagatcttatcttaaaatgttatctttatttattttttcagacagggtcttgctctcccacccaggctgaatttgcagtggtgtgattatagcttactgtggctttgatttcctaggctgaagtgatcctcccaactcccccttctgagtagctgggaccacagtatgtgctattatgcccatataattttgtgttttgtttgtttttgtagagatagggtttcaccatattgcccaggctcgtcttgaactcctgggctcaagtgatccaccagcgttggcctcccaaaatgctggaattacaagcttgagccactacatctggccctgcattcttttttttatgggacagcagtctactcactcattactttccctatcaggggaatttttttttttttttttttttttttttgttgagacggagttttgctctgtcgcccaggctggtgtgtagtggcgcaatctcggctcactgcaaactctgcctcccaggttcacaccattctcctgcctcagcctccccagcagctgggactacaggtgcacaccgccatgcccagctaattttttgtatttttagtagagacggggtttcacggcgttagccaggatggtctcgatctcctgacctcgtgatccgcctgtctcagcctcccaaagtgctgggattacaggtgtgagccactgtgcccagcctcatcaggggatttttaacctttccatttctctactgtgggtccatgccaatgtccagatgtatttatttgtctagaattggatgttcttgtaaaaagagcggtcgaaggaatggcctcctagctgatttccaggattctaatcttcatggtctaagctgtaggtttccaaacatggatactggttagagtcaccataaggcatctaaaacctacccatgcatgtgacttcccctaagaatgtctgatttgattggtgtgtggtatgtcctgggcactggtttttaaaaaatgcttccaagaaaaatggtaattttgcagtggagcaatcttagcccagtgctcaaaattaacatccccagtaatcagtgacatggacatcttagggcatcctaatatgatggatgaataacgcgcagcatcacctctgtggtattcttgcccaaagtgcataacctgagtttaattatgagaaaaaattagaaaagcctaaactgagggttattctacaaaataactcgccaatactcttcaaaaatgttaaggtcatgaactctaaagaaattttcggcactatcccagattaaaggagactgagaggacagaacaaagagatgcaatttgtgatcctaaattggatcatggtccagaaaaaggacatcagtgggaagatagggaagatttgaataaggtctatagattcattaattgtgcagtgtcagagatcatttattattttgatgattgggtagatatctataatgttaatatttggggaagttgaatgaaaagcatttgaggactctgactatttttgggatatttttgaaagtttgaatgtatttcaaaatagaaaaaggaaaaaaaggagaagaaatcttccagatattttcatcaagttgccagagtttaagaccatttcccaagttatcttgcctaattgtcagaataatcttcctgggaatgttgtttatcatatttgtgtccttttcaaagatttccagtgacttctcttatctacaggatgaagttcccattccttatcctgccattcaaagccctcatagaatggccccttgatcaatctacttctttgatctgcattgaaggaccacattttactttatcatgtctaaacattttccaattcttttccttgttaatatagcacccttgcctgtcttctcagtctcttgagttgttctttgtcccaaggcccacttcagactctgtctcttcattgaatcctgtatggtcatttctattagaagcagctaactttccacactttgaattctggtagatataatggtgtggagtgaaacgtgagttttattttattattattatattttagaaaaaaagccaatttagtatgcttattaaaagttttccttttttagggcaggcatgatggctcacgcctgtaatcccagcactttgggaggccgaggtgggtggatgacttgaggtcaggtgtttgagacaagcctagcccacatggtggtaccctgcctccacaaaaaagtataaaaattagctgggcatggtggtccacacctgtaatcctagctactctggaggctgaggtaggagaattgcttgaacccggaagacagaggttgtagggagccaagatcgtgccactacacttcagcctgggtgacacagtgggtgagactccatctcacaaaaaaaaaaaaaggaaaaaaggtttcctttgtaaaaaaaatttttaaattttaattggagaaggattagagattaaattgatgtttgaatttcatagggattaaaaaaatttttattttaggttcagggttacatgtgcaggtttgttatgtaggtaaacccatgtcacagggatttgatatacagattatttcatcactcaggtactaagcctagtaaccaatagtaatttttttctgctcctctccctcctttcaccctccaccctctggtagcctccagtgtctgttgtttccctttgtgttcatgtattctcatcatttagctcagacatataagtgagcatgtactattcggcttcttttcccacattagtttgctaaggttaatatcctgtagctctatccatgttcctgcaaaggacatgatcttattcttttttatggctgcatagtattccatggtgtatatgtaccacatataaaagtacagtctttcattgttgggcatttaggttgattccataccttttctattgtgaatagtgttgcagtgaacatttgtgtgcatgtgtctttatggtagaataatttatattcctctgggtatataccaagtaatgagattgctgggtcaaatggtagttctgtttttaactatttgaagaattgccacactgcttcccacagtggttgaactagttgaaattcccaccaacagtgtataaacgttcccttttctccacaaccttgacagcatgttatcttttgcattttttataatagacattctgactggtgtgagattgtatctcattgtggttttgatgtgcatttctctactgatcagtgatattgggctttttttcatatgctgttggccacatgtgtgtcttttttgagaagtgtctgttcatatcttttgtctactttctactggttgttttattctttttaatttgtgtaagttcctcatagctgatagatattagacctttatcagatgcagtttgcaaatagtttctcccattctgtacattgtttattctgttgatagtttcttttgctaaaagcagaagttttagattcagaaataagtgagtctgagttttgtttccaatttttatcaggtctgatataagggacaatttattgatgtctttggatagaaggataatagtgcctactgaaagggtcattgtgaacattggatgaggtgcaaacataaaggttcccagcacatagtagcttccttcctcatcatttttgtagcccagtggtccccaaatgtgttgtgggtgctgtgaagactcttatcaaattttttttgtagagcttttaaaaaatatttgtacctggccatcactaagatgaccttgaactgaactgagtgcttagggctttaaggagttcaattgagatttgtttttccaagaacacaacaaactaaataagtgatctatggacaggaatgtaacccaatggaggaaaaagggaaggtcaatgggattctaaatgagagatagctgtgatgctttctgcacccattcctttgctctcagtcagacagcgttaaggaagtacaacttttaaaattatgtaagagaagacaaaaatctcaggactttcaaactcattacaccaaagggatagttcagcctggagactgagtcatgcaatgctaccatctttttacccagtgaacaactgttaatttacaatcttgtgtgaaagcagtgttcaatagccagacccctacaagaagacctcaggcatctctggatgactgtcctcaaattgtcctttggtgaccttgaagcctttcaagatgtatatccatccataaaacaaagacacatcaattgtaactttaggtgtgcaatctaagtccagcttctaaaatgaaagcctgttagatttcacactgataatgcttatctttctaagtacagaagaaagacaagatgagaccaattattctttactatacttgtcccttcctacctgccttgccccctttaaggagatgtataaataccaggcctcctaaaaacctttttcagagagaacttaagacatggagggtttctatgatttgtgtttttccagggtgtgccctcaagctctggcttaagaaacctcaattgattcagacacttgcctcagtcactcattatggttaacattctggtgaccattaagggatactctgagtggagttttgctcccatgttttgtgttatcaaaaatgtggatatggggacatttgaggccacagaattttactttaacatttgctgtcccaggacatcaacttccgtttctcttctgtataggagggtgttttgttcacaagtctcagagctattaaatcaacccagctgtccatcaacagtggattagatgatgaaatccatacctatgctccatggaatactaggcagccataaaaaaagaaaaaaaatcatttccttcccagtactatgtttgcagctggaggccattatcctaagcaaataacaaaggaagagaaaaccataaaccataacctagtaagtgagaacaaatattggatattgagggacataaaaatggcaaaaagagaagctaggaactactagaggggagaagcaaggaagggagtaagaaatgaaaaactaagtgttgagtgctatgcgcaatatctgggtgagaggattattcatacccctaacctcagcattatgcagtatacccaggggataggtgtgcacatgtaacctctgaatctaaaataaaagttgaagaataaagagaaaagttttacaagtttacagtctcaagaactttgtaatcaatgctgtgaaactacttatatttattcaaaagatctacttggatggaattgatatctttagaatacttattttttcggatccatgagtatggtatatttctctatttaggccttctttaatgtctgttgattgttataattttgtctgaagagattgcagtgattttggtctttggttggattgagtcctaaatattttatattttctgacactattgtattccctttacactatctagctgcctgttttttctatacagaaattaatatattttagtctattcttatagtactcagctccctaaactctcttatttctacttttttattagtctttaggatttttctatataaacaatgctattctctgaaaataatgacagttttatttctacttttccgacctttgtacctcttatttgtcatttatttcttactgcttttgggtaggaactccaatacagtgttaaataaaagttatcactgaaaaaaatgagaatgaacatttttttctgtgaactattatatatttaccctcttttctgctacattttggttatattaattttatgtgttctttatatatgagcttattatctgtttattataattgcaagatattatttgcttttcttacagagaatttttccacatgaacactctttttgaaaggttcaggtatatcaatatttctttcttggctacacaatgagaaagtctttcttcaccttggggtggtttagtggctttgatttggcttcaatttttatccatttggaacatgtccagtaatatgttgtcctgttcaagatggttaccagttatccatctaacactgtgaatgtccatgttgttcacaataagtcacttaaaagactttgtcagtactctagcaaaaattcataatctctacaagaatatgcatttgaaccacacaatcaacaggcagcaagaatagcacactacgtccatatgccctgcaccatagatgttctcttcaagtccacatggaacatttatgaagactgaactaagtcatatattagcaaatattaatattaatataaatattaatagcattgaatcatttttacccaatcacctatttagtatactgtgcaatgtgggtactattctctaaaacatgaattttaaatattaggcatttggagattttaaaagcacatgtcaatcaagacacagtgatgaacattcaaatacttggtacttgactgacagttcatttgccaaaactcgtaagatgcagccacagtggagccccagggaattcatgacccaaaaggcttatactagaaaagattgattaaagatgagttaatcctcaccttaagaagggagagaaaaacaaagcaaggagaataaaacttataagaaacctaaaagtagaaaacaataagctagaagacaaattaaaaaaaaacaagaacatgaatagacccaaaaataatgttgttgaaaaagataagttatttaaacttctggactaattcattaacaaaacaataaagaaagaaaaaagaaacagatttagcagtgagagagagtggatgtaatctcatctgcggcagaagttgaaagtttcttttcaaaatttcacaacactaagttaattgataatttaaacaaaattgacaagttcctagaaaattaggtataataaaaagtagcacaggaataaatggaaattctgacctgtcctataactatgtttaaaaaaatttcttttgtgtgtgtgacagggcctcattcctgtttctccagttggagtgtagtggtgcaatcatggatcactgcaacctcaacctcccaggctcaagtgatcctaccacctcagcctcataaggagctgggaccacaggtgcatgccaccatggctggctatttttttctatttttagtagagacagggattcatcatactgcccaggcttgtctggacctcttaggctcaagttcttccttggcctttgaaagtcctgagattacaggtgtgagccaccatacccggccccaatcttgaaattttacttaatattttaaatattcacaaacatacacaaacacacatacatacatgtggatactcagaaaaagcagatgactttgggatgatgatgaatatttctacagtggaaaaaaataaatctacatctgtaattcacaccacatgctaatcttttttttttttgagatggagtcttgctctgtcacccagtctggagtgcagtggtgtgatctcggctcactgcaagctctgcctcccaggttcacaccattctcctgcctcagcctcctgagtagctgggactacaggtgcccgctaccatgcccagctactgttttttgtatttttagcagagacagggtttcactgtattagccaggatggtctcgatctcctgacctcgtgattcacccgcctcggcctcccaaagtgctgggattacaggcatgagccgccgtgcccagccgataatcttttcacaataaaattattgagaatattcttcaaaaggctcctaattttcttcgtttcttctacatacacaagacatacagagacagatctgtgtatctactatacaacaaagaagccatagccaaggtacatatgaaaatccaacagaaacagtaagaggaagattgataacacaatgtttttaaatggcggaaaactcttaagaggcaccagatggtagaacatgtgtaatggcctgtgagtacatgaaaagatgcatttgcactattgtttacttaggaaaagcatattaaaaccattttgaaatctcatcccaaccacagaagaaaggctaaaattcaatgggctgacaatcccaagagttggaacaactctacagagagatgttgctggtgggaatttagatgtgttcagctctctaacaagagaatctataatttgtagctatcttagaagatgtcccagcatatacaatggtctctacacccaaggaaataaatgagaccaccaaaatacatgtgtagatatgtccacattaacatgattcagaagacacaaatagtgttgcagtttgaatgtgtaacactacaggggataaaactgtggtgcattcaaactaacggatatttacaacatgaaaaataaatggattcctgctgcataaatcatggatgatctcacacaaagagttgcaagagaagagccagtgcagaggggaaaatgaagactgattccacctctataaagttcccaagaggcaaaacctatctgtagtgctagagatcagaatggaggtaacctggcacttggaatggctaggtttggggaggggaggtcatgaagcctgtcacctggacactctgtgtgagtacacgggcaacacccattacatctccacacacagctctggtcatcaggcatttttagggggactctagcaagggattaggaatcatgcatgagaatcatctacagagagaaacatagagttggaggagctggttgctaacgcagagcagggtccctgttgttcacaggtctagcctagtcttaagttcccagccccactcccactcctgccatgatccaggaacctctgaaaagcagctttttccaaggacctcctccttggtaacacatcaaggtttctcactgtcaagctgtccagaaagaaaagcaacttggatagtgcccataacatctgcgccctggggctcagggctcagcagaaatggcagagggcagtgagaggagacatggtgaatggggtagggacctagggacagctgcctggaacaggagcaggtggggccacaggagaaggtggcacaggaaggaatgggcaggagaggagaggagaggaggagacaggctctgtggggctatagcccagtgtgagcctttgtgaggctatctcagcagggaaggccaggtggtgtgaacaggaggagaagcaactcccacctcccctgctaggaactgaatgtgtacactcccaaattttgaaggtttcatttttaatgtgaaggtggtggaggtggtgccaggcatggtggctcacgcctgtaatcccagcactttgggaggtcgaggcaggcagatcacctgaggtcaggagttcaagaccagcctggccaacatggcaaaaccccatctctactaaaaatacaaaaattagctgagtgtggtggcgggtgcctgtaattccagctacttgggaggctgaggcaggagaaatgcttgaacctgggaggctgatgttgcagtgagccgagattacgctactacgctccagcctgggtgacacagtgagattccatctcaaaaaaaaaaaaaaaatttggaggtggggcctttgggagataattagaataagagtcagtcataaaggtaggagcttcatgatggaattaatgcccctataaaaagtggaagacacaggaaaatgatctctctctctccttttttctgtccctccaccccctcccaaccctccaccatgtgcagatacagcaagaaagcagcatctgcaagaaagccctcaccaggaccaaatcagctgacacctcaaccttggactacccagcttcccgaactgtgaggtatagatttttattgtttaagtcaccaaggctacggtgtttttaatagcagcccaagcccaggaatacatcatctgactcactattttgaatcaaactcttcagtttctccatcaacttagctggcagctcctgtccccagcagcatcagaggccccatgaaaagagctccagcaggggctcagcctgcatgggtcccatgcggcagcctcagtgtcagagcctggatggcaggtgaggctccagtgacacaaccacaatgtgaaagtgtaagagtttttaactacttatagatactggaaagcacagggcacacctggagaccacagacactggggtcagagagcccaggcagggaggagagaagggaactgtaggccaatggctttattgggtctagggtgttattgacaggtttccagaagggagctttaatgggtgtgtttaaagcaggcaaacactggggcaagaagatcacactgtgactgagaggtggtcactttaaattggagggcgaatgtcacaactgtttcagtttaaaggaagcagctggcgagaggggagcccagcacactatgcaagagagatgcctctaagattttatctgtggccaccgactggagccatttggaccgggtacagcagtggaaactctgtgatggtgacaaacatgggaatcactctgatgtgacgcagttaaatttacaccttaaaaaatggatgccaagacaacataaacaagacccagggacaccaacagggtatggtgctgtgccccagagtcagggtcctgggttcttacccagggaagtgagaaataaagataacttttccctgctccctctctcctcccctgacactgatcttcccaccctgtacctccctcttctgctcccaaacccccacccagtgctcagtcgcagacatcactgcctgcagggcatgcacagtgcagcccattgcacacaaactacaaactcacagaaggtgatgacaatttgtgtttgggacgtctgattgtgaaagagggaggacagcgtacttgcagccacagagactgaaactggaacgtgatggaacggggctggaacgtgatggagctctgacataacagacgtgtgactttgtgtgaaatgtgcagatccatgtggaataaaacacagcctagcctgtggctgctgccgtccacatttccctcatcttccaacagaagtcagcagggtccctcccagcctggaacctccctagagactgctgacctcccttggcagggcccacaggccagcagggtccgccctcaccagggtcacttggcccatgtcctccttgctcctccaagctccccacccaagtctgtcagcttttccctgcagcccagcggccacccacctgaggccactctctctgcaggcagctcctgcccccacaccccatttttcctggggcagtgctggtgcatgtgatgccacactgggcactttcccatcgtgacctccttccatcctcatcaactccttctgtgactgctccctaaatgcctgcccctgctccatctttcctgttctctggggcattccaggcttccagaacagcatctgcctgagtgcccacagtaccaatgggaatcaaccagacaccctgtaacctgccctctgcaccctaggaggctcagagcacatgtgacggtcacacacaggcaccatctgggatttgtccacctgtcccctgctgtccctcatgaagtcaggagggaggacagagctctccggtgtgtatggggtggggagtaagcatgagctccctgggttagaacacaacccaccttcacccgccctcttaggtgtgagcaccgtcctcccagatgggctatctgaccactacctgtgcttcctctacacaaaggggcttgaccaggtccaaatcctcaggacagaccccaggagatgtcaacatgaaaagggctgagcacatcctggcttcagagtaagtcgggactagtgtctccagctcagagcccctgctatgtcccaagctacctctcctaggtctcagagagctgtgtcctacagggtccctgggcagctccccactccttgctctgccagccatggggaaggtggggtgaccacaggacaatcagccatgcagaggacagaggacacccaagatggtcagggaggacatggaggagcctgaaccccagctcagccaccagactccagggagcaagagagtggctgagacttgtccctggtgaccacgaggttcacagcccccagtgaataaccagcacaggcctctcctcccaggagacataagagattaaccctgtacacctccaggaaggacagttccctctggaacactagggtcctgaaagtttatccttggaagctgcaggaagcttgacacaattagagaaagggagggtccttctcgctagccagcactcagctcacccaaagcacagtaggggtgtcctcgtgacagggtcctggtgcagcctgtcctcctgctctgaagggaagagacagatggggatgggagagggcagggggagtgactgtgcaccccaacttggagccatgaaaatggctgaatgctgagggtccagggctgggctcacccagcctacaaagtgtgtgtgactgtgagtgtctgtgtctctgtgtgtgtgtgtgtgtgtctttgtgtgtgtgtgtgtgtctgcacataatgtgtgtagaggttgggtgagagaatcactggtgaaagaggcagaggactcagcaattctgagaggcttgaaacacagacagaaggggaaggggagggaggaaaaagggggcaggactgagaggggaggggacagggaggtgtcctgggcacagaccccgcccatgagcctgagaaatgctcctgccctgggaagaggctcagtgcagaagaaggaaaacagcacagctgacagctgtgttcagaaagtttctggatcccatgctcatctccacaaaggaggacaagcaggcagcagagaccatggtgatttcctcagctcctccctgcagatggcatgtttcctggcagaggctcctgctcacaggtaggtgaaggaaggccttcctgggagaggacgggaggaggaagcacagtgactggctggggtctcctggaaggatggggctctgagaggggacagagggcttctgttggagtctgaataggtaagaagatacagaagagggacaggggtcaaaacaaaaaaaatcacattgatctggaataggtaagaagcaggaaaatctcaagtgttttattttcctggttaatcttcactggccactatattttgaaaaatgatattaataactatgtcagatgacacttcacataaaaacataaccagggcatgaaacattgtcctcagccaccaaccccagaaattggagcgtaaaccccgggatgtgtatagcactgggaacgctcatgaactcatccacaggagtctacagactgtcccaggcactgggatgcaaccaagatcacacaagcccctgtcctcacagagctcacactctcctggggaggaagacagacatacaaagagatctagaatgtgaggttaggtgttgacaagagctctggagggagcagagcagggaaaggtcagaaagggaagacccagggtctctagaagaggcttcagggaagaagtctcccaaggacatcctgatgtgagcaggacctgagggcagtggggagggagccatgcagactcctggggaagaggattccacacagggaaatgccaaggtcagaggtgttgaaaaaatcagggtcatgcttctgaccttgacccagtaggatacacacacactctaaggtggagggttgaagagaccttctcaacacccagggtcccatcttttgataccaatagataggtccccaaattgtctgatgctctctccccttcctagccttactttgaattttctgaaacctgcctaccactgcccatgtcactgttgaagccctgctgtctgatgctgcagaggggcaggaagttgttctacttgtttatcatctgccccaggattgtcttggctacaactggtacaaaggggaccaagtggctgccaaccaccaaattataggatatgtaatcgacacttaagtaactaccccagggcctgcatacagtgatcaggagacgataaacttctatgcatgcctgctgatccataacgtgacccaaaatgacacaggattctacacccttgaagttataaagctaaatcttatgaatgaagaaataaccatacaattcagcttacgccgtgagtgattccttatgtcctctgggtgttggggttcagttctacctcacacacacaggattgtcaggcctgagctgtgccttatttccctctgcattatgtctcattttagggtttggacattagtgcaggacacacagaggggagacagacttcagcagatcagaattcctttcctgcatccagatcctggagacattcactgtacagaaaggacagtctgatgtggggactcagccggagatcagtctcagccaagcacctcatgcctcccccatggacctgactctgagaaagaccctggagctgggccaaggcctggcctgagggacaccctgggattctcttagagaagctcagccctgaaggccccagctccagacttgtgtctcaggatcctgactccacgtgaccctggggagcctgtgccaggcctgggttgtagcttcctgggcaaggcttactggaagcaaatatttaccagctgtccacaggctgtggctcctagagctgcttaccagctatggtttagctccagagcctcatctgggcaaggacagagccttctccacctgagactcagagtacagaggacagagggacaagcttcttagtccatcagccagctgccctgggaagcttagtagactccatagaaagttcagtgtccccagggacagaaacagaagagagaagatgttcctagcatcccttgttcacagggatcaggcctatgggtagcctctcatggaggcaaataataacaaatgctgtttgtatgaacacttcttctgtgccaagcattaggtcagatgactgtgaatgatttaaagttcattcaccaacaacatagcaagccatacaccacttgccatttagcttatttgactgagagaaaactaagccacagggagacacagtcaccgaaccagagtcacacaaacatgaggggcagatcagagtcacatgaccctctcctccagcagaagtgggggcttattggtttccaggaacccccaccgtcatccattggctcacatcctttcttctttggcatccaaacctcagaggagtgagagtaaatggacaaccgattagtctgtactccagaactaaatcacctgcttcagctatcagagtcagtgcgaggaatgtccagacttcctcctcagatcctaatctcccttactgcacctgaaatcctgtgtttttcagagtgtcagtgtcactctcatgggaggctaaaggagaagactttgctttctctccccattcacaccctgtgccagcacaggcccaacgtgagacacacactctagttcttgtatgaaggatagagggattgaatgaagtatccataacctctttagagactggatcctggatgcagaatcctaatataatagaaattgctggccgtacccattccctgtttctcaggggctgagacccatgttccatccctctgaacccctgcccctaaagccatcccacctcctgtgactctggagttccttggccatgggagggttttcagggctccctggtcctggtctggagcactaggtgcacctggtccctggagtcactaaggtcattgtaacccccactgctcactgacatgggtgtttctggctctctctgctcctctgtgtctctcatcttctttctccttaattttagctgccatgccctgtcctgcacagcctcctctacccttgggactccccccgacattccctctaaaaaggctgattgttctgtttcccttcctgcttacaccgtggcctggctcagctcccaggaaataggaaaggcacataaattcagctggatctgcaggccctgctaggctccatcatgaaccagtgtccccaggtcaccaggagaatgagcttccattgagtccccatccagggctctttccgtttatgaggccaacatgtggaacaggccactagacagggatgaacagctcctctatcgactcttataatcacctgacaagttcttcttgcccgactgcacagacaaaaccaatttattgagatggtgatttgtagaaaaggaagattttaattactctgtttgccaagcaggaggacagaggttattatgactcaaatcagcctccccagttgctcagaggttatagtttttcaagcatagtttcagtggcagaggtctaaggaatgggtactgctgattgctcaggtatgaaatcatgaggatggggaaaatggcctgtattttctgaatccacctctgagtggaggccacatgactggttgagccattagtcatgggtctggatgaggtcagctggtttccaggatgcaaaagtctgagaaacatctcaaaagataaatctcagtttctacgatagtgatgttttctataggagcaattaggggagtcacaaatcttgtgacctctgtacacatgagtcctgagcagtaagggattgcagaaactgcctacagtttagcagaatttgggctgctcctgtaatcctaatctcatggtctttcattagttttagaaagccagtccctgagcaaggagggagttagttttagaaagggactattatcatccttgcttcaatgttaacctataaactaaattccttccagtgttagcctggcttatttccaggaatgagcaaacacatccagtcaggatagaggccagatggagtcagccatgctagcttgctcccactgtcctaatctttgcaaaggtgatttcactctctacattgactcagcaggggggtcagaggcaggggtacaggtctgcagtccccaaagcccacgggctcctttcatccatttcacttatgactccatcctcatcctgctagctgtgaggctcacatcctccagtcatttcctagagacttctggtttcctgtcaggcctatagcaagcttgaaatttgtcactcagttctaacaacaagtaaaaagctgaacaaactcaaaaatcaacaactcttttagatcccacagagaagtgaggtctcaatgctaactgacccatatattgaagagaccaacaggcaaagacagacaacacactttacctgagcagaaacccctggcacagaaacctcagtgggaaccagtactggggtcagaaaaacctgaactgtcactaatgaattgctggagggtcagtgtgaacaagatccagagttaaacactcaggggaatggattacttctgggggtagggggacatgtttgtgactcttagcttctggagcactaccaggttcctatagtaatacccagtaaaaatcagctcatccttcctgcaggggaaggggaaaagaaaccactttgaaagatgccagtgaattctattctgggcaagacctgcctttaagagaaactattttaccagagtctaatcagctggggtttgataggagccttaaatgccctggggaaggggaaatagccaactctagccccctgtagccatcatgtcccacctaagggaaagaaaaaactgagaggcacttacagcattcacagcccaggacacagctctaatgcaataccacagaacccttccctccatggcatcactgaatgcctcactcaccacagcatcactgaatgcctgctcacccaagtttcttttacccagtacatcatgtctgatttgcaaaaaaaccatacaaggcagactaagaggcaacattagacactatgcagaaacagatgggtgacataagtagagagatggatattctaagaaagaaccaagagaagtgctagagataaaaaacactgtaagagaaatgaaaaatgcccttgataagcttttgaaagtgtgtatactggtaggcttaacacagctgaggaaaagatctttagctttatggtgtgttaatagaaacttcaaaaactgaaacagtaaagtttaaaaagagtgacaaaaaagtggaagaacatattcaagttcatactgaatattttgtattgacaatagcatattttatgttttgtagttgtgggacaactacaaaggctgtaacatacacataatgggaatactgggaccaggcagaggtggccaggtgggtgctatctgatgggcttactgcctgtttcacacacatctgtgtcctcatcgtgatgccattgccataaggtggggtctttcaggtggggagatgcacaagccactggcatcttacttagactctgcccagtttaaacgaacttaaactctagttgtgtttcctgaggtctagggaaaatgaggaaagcatttcacatgcctgtttcaggctcttccccatttttcctaagtctgcacaggaattagggatagggaggtctttctaaatttgctaatataacacacattgcttctcctaattcggcatctttcctccctttatgtattgtaattgacacacataagacttcttctttgactggtactgtcctcctaacaggaaccatgagcctctctctattcagggagttgctaatttcaaaccaccttcagcatcttcctttgagcataatgccatcctgctggaattcacagcacaccttaaccttattttggtatctagagaaatactacttccatcaatcgaacttagatatttgcactattaataacaatttctacttatggaaaaaatttaatgtttcctccaatttttttttgttactatagtcagaacataacatgagttctaaactccggacaaaattttaagggcagattacagtattacacatggagctccccaaattcaaaaatccaaaatctgcaatactccaaaattcaacatttatcagctgctgatgtaatgctccaaagaaattctcactggaacactttgaattttaaaatgttcagattcaggatgctaaaccagtaagcatactacaaatattcacaaatctaaaaaagttagaaacccgaaacacatttggtcttaagccttatgcataagaactactcagtcttaatgaactgtaggaaccaagctgtacagcagatctctagaacctcctcatcttgcataactaaaactgcatatccattgaaaaactccctattcacttcagtcccagctcctggcacccaccattctactctctgattcactctggaatccacttatatgaggtccctagagtagtcaaactcatgaaatctgagtgtagaatgtccaacaggagaaaatatttgcaaaacttcctcccaaatttctgtctcatattccatcaaacacacatggtccatgaggaccagatttccaacagttcatgttccctgtctccaccagtcagttctgcatttgcaaacatccacatgtatttctagaaagatccacatggtcctcacctgccctctgcaaagggagagggaacatcaaaaacccaggagggggaatatgtttctgctccaaagccaccagcttttgcttgtcctcttcactctttctagatcattctttagactctgctctatcttcagaggtcactggttcaagtcattcaccatgaaatatttggtgaaaattgttccacctagtggctccactgcctgatgactgaattggcctccaggcttgcccctggtctcttctgtgttaattctactaaaacatccagtcccaggctaaggacagtgaaaagtcccattgtcacccatctctaagatgctcttggaaagggaagccacagagaaaacaactgggtggtggtgggtgggggtggggggcaaagtaggactgtgaagctggaaggagcacagcacctgcacattccaggtgtggataccaaggtgggccaggcaggcagcaagtcagggagggaccaggagaggcaccaggagcggtgacttctgcttttgtgtttatccatgacccagtgctgctgctcaatttatacttgagaaagcctgtgcttctctaagacagagcaggcagactcatggtctctgagccctcagatcatcatgcatctgtcttgtgacacacacacctgccatgggtttttaaagagttgggtgggctgagaggtgggagatgccaactctgattgaaagatgcccatgggggaatcaaaggtgccacgcagggcaatcttctgttatctgcacagcagagctgtccaagccctccgtcaccagcaacaactccaaccccatggaggacaaggatgctgtggccttaacttgtgaacctgagacccagggcacaacctacctgtggtgggtaaatggtcagagcctcccggccagttccaggctgcagctgtccaataacaacaggaccctcactgtactcaatgtcacaaggaattacacaggaccctataagtgtgaaatctggaatcgagtgagtgtcagtcacagttaccctgtcaccctggatgtcctctgtagcccaggctgccaacccaaattgacatggccagaatccaggcctctcagtccttctcaggtccaagaacagagactctcagccctggatatcaaagctgtccatgactgcctgccccaggcaaattttggtaggcccagccttaaccaagaataagagaggaatgggatgctcctgtcacaggagacttgaggtccccagtttgtgatggggaaacaggtggatgtctcagactccagctcagtggacacagcaggagtttggttgggacttaaggattcttcttctttggctcagagggacactgtggcctttctacagaccaggagtattcttggcttatcaatgaaaagctccagcaatacacacaagagctctttatccccaaaatcactgcaaagaatagcggggtctatgcttgttttgtccgtaactcagccactgacctcagtaagttcacagtcaagaggatcacagtctctgataagtggatctctgcatcattggcaatatgtttttgggtggagtctatctggcttttagagatcagtgaggaaaaatattttattctcagtcaatgtccaatggacaaaaggaaatcccaaatttttctcttggaccctcccgatgcatctatatgactccctgccccttgtttttctttctcatggctgcccttgggtccagcctgagaaatatgtcgagggggctttgtcagccccagagcacttcactgagggggaaggaggaggattctcaaggccacgttgcttctctctattaccaacacatttttttttctgttacctctttgttttcttttacctactccttgagctacaaggaacatctgaagctttgaaacaagctcacactttttcccaaatgagaggaggacgccccttggatgaggaagaagcagctcagactctgctctctgctctgcttcaggctcacttggtgactggccctgccctgactccacctggtgtgagaacagggtggtggaaaaggtgcctgggtggcctgtcccgaatctggctaaatctagctgccagcagaagcaaagcctcccccaggttaggctgcagggaaatgggaagagagggagcctcagggcagactcctgagctgtgtcctggctctgaagtcactggctgtatgaggctgtgggcacagcacatgggacacagcacagaggacagtgagtgatatgcaatggaaacatttggagattaacccttgggggcagggaaggggcagtgtcaaaaagtgtgtatttgtagagagggtaaggctaccaggcaccatatatatatatatatatatatatatatatatatatatatatatatatatatatatatatatatatatatatatatatatatatatatatatatatatatatatatatatatatatatatatatatatatatatatatatatatatatatatatatatatatatatatatatatatatatatatatatatatatatatatatatatatatatatatatatatatatatatatatatatatatatatatatatatatatatatatatatatatatatatatatatatatatatatatatatatatatatatatatatatatatatatatatatatatatatatatatatatatatatatatatatatatatatatatatatatatatatatatatatatatatatatatatatatatatatatatatatatatatatatatatatatatatatatatatatatatatatatatatatatatatatatatatatatataaaataagtcttaccgttaactatttctaagcgtgcaatttagtgttgtgtaaccgttatcactatccatttccagaactttttcatcttaccatactaaacctctgtactcaatacatgataactctcactccttcccccacaacccttactactcaccattctactttctgtgtctgagtgattgactattctaactatcttacataaatgggattatataatagttgtcctttggtgtctggcttttttcacttagcatcatgtcttcaaggttcattcattttgcaccttgtattggaattttattccttgttaagattgaataacattgcaatgtgtggatacacctcatttttctatccacttatctttcaataaacttttcagttgtttccaccattttggctattgtgagtaatgctgttgtgaatggcagtgcataaatatctaatcagatttctttccattgttttgggtgtatgtccagaagtgggattgctggatcaaatggtaattctttgtttaattttttgggaaatagccataccattttccacagcagctatagcatttcccatttccatcagcaatgcactacagctccaatttttccacttacttgaagatactttttgctttgtgctgttgttgtttttatcaaagctatcctaaagtgtgtgaggtggagtatacttgtggttttgatttgcatatctctaagtattagtgatgtcgagcatctctacatgtgcttattggttatttgtatatcttccttggagaaatctctattttagtcctttattcattttttaattttttttttggatttgtgctgttgttgatttgtaatagttcttcatatattctggaaattaatcccttatcagatatataatttgcaaatatttttcccatttcataggttgccttttcacttttctcaataatgttttttgaaattcgaaagttttggccgggtgcggtggctcacgcctgtaatcccagcactttgggaggccgaggtgggtggatcacgaggtcaggagatcaagaccatcctggctaacacggtgaaaccccgtctctactaaaaatacaaaaaaaattagccgggctttggtggagggcgcctgtagtcccagctacttgggaggctgaggcaggagaatggcatgaacccaggaggcggagcttgcagtgagcggagatcgcaccattgcactccaacctggcgacagagcgagactctgtctcggaaaaaaaaaaaagaaatttgaaagattttagcttttatgaagtacaatttatgcattttcttttgttgcctatgtttctgttgttataaccaatatatcattgtgaaatccaatgtcatgaagcttcttttctttgttttcttctaagagtttggtagttttcagtcttccatttaggtccttgatccattgtggattaatttttgtatacagtgttaggtaaaggttcaattcatttttgtccatggatatccagctttcccaatattattttttgaaaagactgtcctttccccattgaatggtcctggcacacttgttgataatcatttggctatatatgcaagcatttctttctgagctctctattctatgccattggtttctatgtcctcctttatgccagtagcacactgtattgattactgtggctttgctgaaataaggaagtgtgagacttccagctttgttctttctttttaaggttgcttggttatttagggtcctgagattccatataaattttaggatagatttttctatttctgccaaaaatgtcactaaaattctggtggaaattgcattgaatctgcagctcactttgcatattgtcctcctaacaatattgagtcttccaatccatataaaatgaagtgtttttccatttattggtgttgtctttaatttctttcagcaatgttttgtagtttacggcatacaattctgttacctccttggttaaacttattcctaaatattttattccttttgaggttaatttgaaatgaaaattttttcttaatttcctttcagagtgttcattattagtttatagaaatacaactgatgttgcatgttaatttagtatccggcaacattactgaatttatttattaattcttacaggtttttttcatctttaggtttttctacatacaaggtaaagttacctgtgaacagatagataatataactactttttccaatttgaatcttttttttcttgcctaatttctttggctaggacatctaataccatgttgaatagaagtggtgaaagcaggcatccttgtcttgttcctgatcatagagaaaaagctttcagtttttctcctttgaatatgatgtttgccttgggcttttcacatattacctttattatgttgaggtgtttttttttcattcatatggagaatgttattatgaaaaattattaaattttgtcaaatgcttttagttgttcaatcttcttactaattataggtctattcagatattttgtatgtctccaggaatttgtccatttcatctagtttatccagtttattggtatacaattattcctagtatttttctaatcattatttatgtataattgatagtaatatctaaattttcctttcttttctttttgcatagagagagagacaggcttgtactctatagtttcacaccatgctggagtgcagtggcatgatcagggctcactgcagactcaacctcctgagctcaagtgatgctctcacctcagcctcccaagtagcttggactacaggtgcatgttaccatgctccgctaatttaaaaacttttttttgtagagacaccgtctccctttgttgcccagactggtctcaaactccttacctcaagtgatcctcccactatggcctcccaaagtgataggattaaaacatgagccatgccaagactttattttcatttctgattttaaataatttcaatattctctctcttctcttagtcaatctagttaatggttgtcaattttgttgatcttattctgaagagccaacttttggtttcattgatttcctctattgtttttctattgtccattttatttatatcgactctaaaccttattatttccttcattcactgtgtttgggtttagtttgttcttctcctatatcctgaagttgtaaagtagattgttgacttgagatccttcttcttttttaatatgagagttaacagttataaatttcttgcacaaaattcttaagttatctgagcttctgactcctcaattgaaaattgcagtaacagcgctttctttatactattgttttaaaggtttaatgtaatcatcaatttaaccttcagaaaaatgccatgcacgcagcaaatggttaatgttagctgctatattactactattatcattagctttgaagtcaggtaatcctagaatcaaatcttagattcacttctcactagccatatgacatctgaaaagttttttcactactccaagcctctgtcttttcatctgtaaaatggaagtaatgtctaccaggcaggtttattgtatgaatcaagtaagatacaggcaaagtacttagcacagaatccggcacataggaattgcccctcagtcatagctaacatagcattattcatcagcctgagttgactggtaagggctaaaagtaaatggttgcaacaaaaataaagaaacatacgccaaaaatgtgtgtgtgtgtgtgtgtgtgtgtgtgtgtgtgtgtaaaaggtattttatgtaaatacaaacacactgttggagaccagcctcaacaccacccgtagggtacctgaagtctggtggcgacaaaggaatgagcagagacaggttaagagttcataaaggtgggagccagggggccagttgcaaaatggaggctgcaaaaggtgccaagctctggtctccatactatttattgagtacaattacttagatctaagaagcagatgttcagggcaaaacagtgaaagggaggcagtatgtcataggtgtaatctatagcaatagcagtttaaatgaatctcctttgcgctcaaacagcatatctttaacttatcggagagtagctagtgggagtgggcttaactgggaacctgcatgtctgtccacattccagtgtttcaaaggagtgtctttctccttgaacacagtgtttatagataagaaagcaggtctcactctgaacatgggaatatgatggcaattaggaggctttcctcctcagaggcctcttgtggctttccacagcttattgtcccatatttttgtggccagtttatacaggcaccccacaatcccttttcccaacacacacacacatatggaaatatggaaaaagaggtaacacagaaaatactaggacactgttactgactacatgtgggagagagagaaaaaactaagtgcaaagaatcaagcctggaatgttagtttttaacccattcagatgcagccaatagtggattagacatggaagagaatttattagggtaaatgcctgtgagggaaaggaaggcaagtgtgagagaagcctgagagagctctcagaccacaacgcagatctgatttctgtgaaagataaagagaaagaaattttggatagcaatgcagttcaaaaagagtttctgcagggctgaaggggagtgccttcaccagtcacccattagagttacacagagtctcacagaactgggcttgctttcatacccctgctgggaggccctgggaagtgaggtctctgcaagggaggtagtgaatttgaaacgcactgacctggcccttctgtcaagcacctccctgccatagagactgacagggtctaattcatggctgccaaaactgagacactgagaaaaagatgcaaccatgaaaaggtggaaggttctaatgacatagcaaatagccatcagcctttctcacatcccaaagccttcaaaaatatctgagtgcagaaagaccaggaaggaatgacagaagactatcaccaacctagaaacatggtgagagaaggaaaaaatggcaaaaatgtggttggctaatcatctctcatcagccttcttatacaaataatttattccttgaaggaacaagtacagtactccatgccgagagctggttcttggggcaccccagtgtaaaacaacatcacttttattccttcttttattttccttccattacagatgtttcagcacagggaagttctcctgtcctcccaactaaggccactgtcagcatcatgattggagtactggccagggtggctctgatatagcagctttggtgtagtttctgcatttcaggaagactggcgggtatgatggcctttcctcttgtcctgtttcctgcagggctgactgccatgcttgggagagggacctatatcccaggactggatctcctcctcctcccaataaactcctgcttctcagcactaattcctgcaggtctcttcttccctggtctgcatgctgcctgtaccccactgtctcttagatgtgattatccccagcctctgctcatttgtttcccagattcaatacactatgaaagtcttttgatcctttcttaacatctctcacttgtgtcattctctccattcccatagacctcaacaactgcttgaattcctgcttgactccttgtctccagtatttgaaatcttccttgcatatgacttcctcattaccttcctaaaatctagttcactcacctactcaagaatctacaggggccgactctggcctattagataagtttacatttcttctctttactaatccttcttacttcctttaccaccactcccttatataattcctctatcctaattacatctgtctccctacatatgcctgcccacccatgccatatacacaagggattattagttcaaattgtatgcctaaaacagggtgaccgccctccatcatctgcactgcaaagttacccacagccttcatcacaagcaacctctgacctcatggagaacaatgactctagcattaatgtgtgaatctaagacttaggacacaatatacatgtggttgggaagctttccctgataaccaatttatgtgttcatgaaaaatacagaaatgaagaaggcaaggtccctaccccagggatcataaagcctaagacacaagataggaccttaaaagtaattataaactccggccctggaccctacagccaccaagatgttaatgcctaagaagagtcggattgccatttatgaactttttttttttttttttttttttgagacagagtctgactctgtcgcccaggctggagtgcagtggagtgatctgggctcacggcaagctccgcctcccaggttcacgccattctccctcctcagcctcccgagtagctgggactacaggcgcccgccaccacgctcggctaattttgtttttgtatttttagtagagacggggtttcactgtgttagccaggatgatctcgatctcctgacctcgagatccacctgccttggcctcccaaagtactgggattacaggtgtgagccacggcgcccagccatgaactcctttttaaggaaggagtcacggtggctaagaaggatgtccacatgcctaagcacccggagctggcagacaagaatgtgcccaaccttcatgtcatgaaggccatgcagtctctcaagtcctgagactacgtgaaggaacagtttgcctggagacatttctactggtaccttaccaatgaaggcatccagtatctccgtgattatcttcatctgcccctggagattgtgcctgccaccctacgccacaaccgtccagagactggcaggcctccgcctaaaggtctggagggtgagccacctgcaagactcaaaagagaggaaaccgacagagatacctacagacggagtgctgtgccccctggtgccgacaagaaaaccgaggctggggccgggtcagcaaccaaattccagtttagaggcggatttggatgtggacgtggtcaaccacctcagaaaaattggagaggattattttgcattgaataaacctacagccaaaaagaaaaaaaaagtaattataataccaaaatagaacaaaatgaatgccacaagaattcagataaatctgatgggaaatacagccacacattggaatcacagggaaacattttttaaaaatggatgctgaagccctcactccccataccttctgatttagtggtctggcgtgggacccaggcattgataatttttaagcttccccagatgctactaatgtgtaaccaggatggtgaactctcctgtttaaataggtaggacgtagggctaaattaatggtttttagctagatgacctagggaggtttttcaacatacataagcctatactttgttggccatatttgttaatgggctacaccgagaactcagtaatccagttaagaaacacaagctaaatggaaaagccactttatttgatatgttaaattatatgggaagcattgtcaaatgataagtttgtgaggtcatcaacttcttgtcctggtttgcagttaagtgcctctagttatggtgtcaaatattttggtgagctctgagtggcccatacctcagacatgaaggttttcccatgaaatttacattgagttgtccccctccagcttatagggcttcaggaacacagcagatcttgttcttactgattccataggagaaattgggttggagaaactagaagaattcagggtccagtccagtctacaggtggattataaaaactcaaaaacaatgaacagagctgaaatctcataaaagttgtgctacagtttttcttctcaacataatttttctctctatgggcatctctatttctaccaaagataataccactaaggcaaatttgtttgcaaaatagattgagtctcatcaaacttggcgtgtattctcaatgttaatttatgggtatgttactgatatgagtcttccaaaaattatatgagattcatagaaatctaatatcagtcataatgtcatatgccacagaagcaactagatttctatatgagccatgtctttatcttaatgaacgctcatcagatttttaaccatagttattttaaatctgtcattcatagacagttgttttgattcttcctcaaagtatttccaatcagctacagtccaaaattgcttcttgcttcaaggagatttacagaaaaggctctgacaaggattctttaatacaagtttttgatgaatttaagataccactggactgtctaagaacttccaagttcttctgataccttcatgaaattgccagccaagaccaagcaggaaaaaactcaatttcattggactaaataataataatgatgagaatgtttttatgattttttgtttggagttttgctgattctttaagtggtttgttttccagatttatggaattttttcttttaaccaatctatagcacacagtaatttgacaaagtatacttttgtgaacaaaaattgaagcatttacttttgctccctacctgactgccttagaattgggcaactattcatgagtattcatatgtttatggtaatacagatatttgcttaagttcaataaatatctgctctctttataacaggatacatttgaaaacattggttatattaccaaggctttgactgggatattacatttgaaaatataaatagaatgaaaccacagatactgcaggcaagtgtaaagtaagccttggtttggcttcctggtctcaagaggtttttgaaagtttaatctgagattccttataaaaaatatccagcaaagcaaagtttaagaagagcctatgtgatccattacaactctttctgcacttaatgtaaaggccaagtttgatgagactcaatctattttgcaaacaaatttgccttagtggtattatctttggtagaaatagagatgcccatagagagaaaaattatgttgagaagaaaaactgtagcacaacttttatgagatttcagctctgttcattgtttttgagtttttataatccacctgtagactggactggaccctgaattcttctagtttctccaacccaatttctcctatggaatcagtaagaacaagatctgctgtgttcctgaagccctataagctggagggggacaactcaatgtaaatttcatgggaaaaccttcatgtctgaggtatgggccactcagagctcaccaaaatatttgacaccataactagaggcacttaactgcaaaccaggacaagaagttgatgacctcacactgtggacagcttttcccaagatgtcaaaacaagactccccttcctgatgaggctcttgcccctcttaatttgtccttgctcatgtctgcctctttttcttggtgagataatgctgtcattagaatttcacaagaagtatcttctgagggtagcttaacagagtgttgaatctgggatgaattcattcccttatttccacataacataagagatcctttagtctacccaatggctgacattagcagcatcttttttttccttcagcaataaccacttttaatgatttagtgtatatttttataatcataaattttacttgtttgaacaggtaatgcattaacagtacaaatttcaacaggtagaaaagcgtatactgaaagtgtccctcataacacctatccctcctccatcctatcacctggtttccctctgcagaggcaaccaggaatatctgtttcttatgtcttatccagacatattctatgtgttaggttggtgcaaaagcaattgcggttttgcccgtacttttaatggcaaaaaccacaattacttttgcaccaacctaatatttacaagcacattggaaggcagctatgctccccactataccaccaacacatcttataagcacattggtctagtctttcttctttttttcaaaagtaaatggtaaacatttgaggcacactgtttgcatctggcttcttcatttaacaatacatcttgcaggtcattccacatcaggatataaaaaatctcttagtcttttaacagctgtatacttgtcttagtccattttatgttgctatagcaaaatacctgagactgggtagcttataaagaaaacaggtttatatggcttatgattctggtggctgtaaagttcaaaattgggcatctgcctctggtgagagcctcaggctcattagcagcatctttaacacagctgttttttcagatgtacagtggtcccttttagactttagaccttcagactcacctgttctcactccctgtttaatttaacccagccatgggatgctagttaataaattggccactactagctgaacaggaaggagtctgtgcagtttctgacacttcttgttgcacatggataaatacgtcggatattatagagacttagttgcaaaaattaacaaatgtgctgcttggttaaaatggctaggctcttctggctcactctttgatgtgttctattttagttggtttgcatcttgcctaaggtgcatattccaaactcttggtattatcttcctgatagtcatattagtagtctcctggtgtgttgtattctgttgtattctccaaaagtttttaaatgtttgcatgcagccatccattgaatatcaaatagtgtctctttggctggagttacaaaaactcaaagaaatgtgtgatcaggaggacattataacctatgaatgatggaagcccaaaatgatggtgatagaaaggattgctaatgtcttaagttctggtcccttagtgaggtcctagagactccaaaacagagccactcatgctaaatgctacatactccgactgaaattttaaggaagcagacagattccaaaacagaccatttttttttctgagaacaggagattccagtctacctgagtcagcataataaggaagtcacctctgctttaacttttacaaaaaaagtgacctgaagtacattgatgttaaccaatccatttctttttttttttaacttcttaaatgcacaaatttattttttctcaacaaacacacatcttaatgcctttacaacttttatctccccaaatatatcttgcttttctttatacatgctgtatacagagttgttttccttatatttagtagttattgcttttttgtgcccttttgggtcctgaatttacacatcaggcatagagcttgggacaggaaagagctgtgaagcaaattcctggaagatcaaaccccttccagcatggccaggtagcacagctgagccagggatgatggggccatattgggtttggctctgccttgcagctggcagtccaaacactgaggacatgcatatttctgcgggcctcactatggtcatctgtccaaaccccagaatccagagactcaaaacgaaatacagtcatacagtaagatatgtgcaaggtttcagggagcccagcagccagaccttacagctttagctcaatttagacaaatcaagcaagtttaagaaatattccagaagtagcagttttatgatcttaaaacatgtaataggctgggcacggtggcccacgcctgtaatcccagcactttgggaggccaaggtgggcagatcacttgaggtcaggagttcgagaccagcctggccaacatggtgaaatcctgtttctactacaaatacaaaaattagccaagtatggtggcatacacctgtagtttagctattcggaaggctgaggcaggagaatcacttgaacctgggagacagaagttgtggtgagctgagatctcaccactgcactccagcctgggcaatgagagcaaaactccagctcaaaaacaaaaaacaaattaaaaaaaaaaaaaaaaagtaatggagacaatgtaaacctgtgtgtcagtagacccaggaaaaaacaattatatttaactgacaatcctgaagcctttccaattttcttttttcttttttttttttttattgatcattcttgggtgtttctcgcagagggggatttggcagggtcataggacaatagtgaagggaaggtcagcagataaacaagtgaacaaaggtctctggctttcctaggcagaggaccctgcggccttccacagtgtttgtgtccctgggtacttgagattagggagtggtgatgactcttaacgagcatgctgccttcaagcatctgtttaacaaagcacatcttgcaccgcccttaatccattcaaccctgagtggacacagcacatgtttcagagagcacagggttgggggtaaggtcacagatcaagaggatcccaaggcagaagaatttttcttagtacagaacaaaatgaaaagtctcccatgtctacctctttctacacagacacagcaaccatccgatttctcaatcttctccccacctttcccccctttctattccacaaaaccaccattgtcatcatggcccgttctcaatgagctgttgagtacacctcccagacggggtggtggccgggcagaggggctcctcacttcccagtaggggcggccgggcagaggcgcccctcacctcccggacagggcggctggccgggcggggggctcacccccccgcctccctcccggatggggcggctggcagggttgggggctgacctccccgcctccctcccggatagggtggctggccgggcgggggcctgacccccccacctccctcccggacggggcggctggccaggcagaggggctcctctcttcccagtaggggcggctgggcagaggcgcccctcacctcccggacggggcggctggccaggcagggggctgaccccccgcctccctcccggacggggcggctaaccaatccatttctatggctctgtttactggttctcatttgacaaaatccactgttctgttattgtattgcccagggggagctatcactgtatttatagaatgagttctgccccaaatcatgaatcacaattaaaagccaatttgatctggccgggtgcggtggctcacgcctgtaaacccagcactttgggaggctgaggcaggtggaccacaaggtcaggagatcgagaccatcctggctaacatggtgaaaccctgtctctactaaaaatacaaaaaaaaaaaaaaaaaaaaattagccgggcatggtggtaggtgcctcccagctactcaggaggctgaggcaggagaatggtgtgaacctgggaggcggagcttgcagtgagctgagatcgtgccactgcactccagcctgggcgacaaagcgagactctgtctcaggaaaaaaaaagcgccaattagatttgtaactaaattaattatagatctatagtaattttgtctttcgatgcacgttcacagccagcgatggccaatggtgtctctcacgctgcatcattctcaccctgaccctcctgcctccctctttcacttacaagtacccttatgatacactgggcccactgagataatccagaataaccttcccatctcaagattcttaacctcatcacatcttcaaagtctttttgccaaatatagtaacatgcactggttccaggggtcaggatgtggacatttttaggaggccatgattctgtgtaacacacgtacccttcatgaacatcaactacaacaaaaattagctttaccttccttctgtgtctcacttttctgactgtgcataaactttaagatgaaacacagtagttctgctatgaactggctggatgaccatggaccactgacttaaattccctcagcttcttctcctctgcggtagaatgtgactctttttttttttttttttactttttttattttcttttttttattattatactttaagttctgggatacatgtgcagaacgtgcaggtttgctacttaaattccctcagcttcttctcatctgcagtagaaggtgactcttttttttttttttttactttttcttttctttttttaaaattatactttaagttctgggatacatgtgcagaacatgcaggtttgttacgtaggtatacatgtgccatggtggtttgctgcacccatcaatcgatcacctacattaggtatttctcttaatgctatccctctcttagtccgccatcccccaacaggccccggtgtgtgatgttcccctccctgtgtccatgtgttctcattgttcaacccccacttacgagttagaacatgtggtgtttggttttctgttcctgtgttagtttgccaagaataatggcttcaagcttcatccatgtcccttcaaagacatgaactcatccttttttatggctgtgttgtattccatggtatatatgtgccacattttctttatccagtctatcattgatgggcatttgggttggttccaagtctttgctattgtaaatagtgctgcaataaacatatgtgtccatgtgtctttatggtagaataatttataatcctttgagtatatacccagtaatggaattactgagtcaagtggtatttcttgttctagatccttgaggaattgccacattgtcttccataatggttgaactaatttacactcctaccaacagtgtaaacatgttcctatttctccacatcctctccagcatctgtttcctgactttttaatgattgccatcctaactggcatgagatggtatctcattgtgattttgatttgcatttctctaatgaccagtgatgatgagcttttttccatatgtttgttggtcaataaatgtcttcttttgagaagtgcctgttcatatccttctcccactttttgatggggatgtttgttttttcttgtaaatttgtttaagttccttgtagattctggatattagtcctttgtcggatggattgattgtaaaaattttctcctattctgtaggttgcctgttcactctgatggtagtttcttttgctgtgcagaagctttttggtttaattagatcccattggtcatttctggcttttgttgccattgcttttggtgttttagtcatgaagtctttgcccatgcctacgtcctgaatggtattgcctaggttttcttctagggttttgatggttttaggcctatgtttaactctttaatccatcttgagttaatttctgtataacgtgtaaggaaggggtccagtgtcagttttctgcatatggctagccagttttcccaatgccatttattaaatagggaatcctttccccattgcttgtttttgtcaggtttgtcatggttgtagatgtgtggtgttacttctgaggcctctgttctgttccattggtctatatatctgttttggtaccagtacaatttttttttggttactgtagccttgtagtaagtttgaagtcaggtagcatgatgcctccagctttgttctttttgcttacaatcgtcttggctatacgggctcttttttggttccatatgaaatttaaagtagttttttctgagaagaaagtcaatggtagcttgatggggatagcattgaatctatacattactttgggcagtatggccattttcacgatattgattcttcctatccacgagcatggaatgtttctccatttgtttgtgtcttctcttatttccttgagcagtggtttgtagttttctttgaagaggtccttcacatcccttgtaagttgtattcctaggtattttattcactttgtagcaattgtgaatgggagttcactcatgatttggctctctgtttgcctgttattggtgtgtgggaatgcttgtgatttttgcatattgattttgtatcctgagactttgctgaggttggttatcagcttaaggagattttgggctgagatgatggggttttctaaatatactatcatgccatttacaaacagagacaatttgacttcctcttttcctgtatgaataccctttatttctttctcttgcctgattgccctggccagaacttccaatactatgttgaataagagtggtgagagagggcgtccttgtcttgtgctggttttcaaagggaatgcttccagcttttgcccattcagtatgatattggctgtgggtttgtcataaatagctcttattattttgagacatattccatcaacacctagtttattgagagtttttagcatcaaggggtgttgaattttatcgaaagccttttctgcatctattgagataatctgtggttcttgtcatgggttttgtttatgtaatggattatgtgtattgatttgcatatgttgaatgagccttgtatcccagggatgaagccgacttgatcgtggtggataagctttttgatgtgctgctggattcggtttggcaatattttattgaggatttttgcatcgatgttcatcagggatattggcctgaaattttcttttttggttgtgtctctgccaggttttggtatcaggatgatgctggcctcataaaatgagttagggaggagtccctgtttttctattgcttggaatagtttcagaaggaatggtatcagctcctctttgtacctctggcagaatttggctgtgaatccatctggtcctgggctttttttgcttagtaggctattaactactgcctcaatttcagaacttgttattggtctcttcagggattcgacttcttcctggtttagacttgggagggtgtatgtgtccaggaatttatccatttcttctagtacctttttaaactaaaaacatattttactttttataatatactttgcatatagggttgttttgtctatatctgttttaatcacatagtgtgattacataataagctcctagtaaccctttgatatggtttggatctgtgtctttgcccaaatctcatatcaaattgtaatctccaatgctggaggtggggcctggtgagaggtgattgaaatatgggggaggtctctcatgatataacatcattgcccttggtgctgccataatgattgagaattcttgtgagatctgattgtttaaccatgtgtagcacctcccccttgctctcttcttcctgcctccatcatgtgagatgccttgctccctctttgccttcctgcattgtaagttttctgaggcctcctcagaagcagagcaggtgccagaattatgcttcctatacagcctgccaaaccatgggtgaattcaacctcttttctttttcttttttctttctttttcttttttttttttttttttgacacggagtctcactctgtcacccaggctggagtgcagtggcatgacgtcagctcactgcaagctctgcctcgtgggttcactccattctcctgcctcagcctcccgagtagttgggactataggtgcccaccaccatgcccggctaattttttgtatttttagtagagacggggtttcaccgtgttagccaggatggtctcgatctcttgaccttgtgatccgcccgcctcagtctcccaaagtgctgggattacaggcgtgagccaccatgcctggcctcaacctcttttctttataaattacccagtctcacatatttcttggtagcaacatgggaacagactaatacacccttatattcagtagaacaaactagaaagtaagcagttctaactatgtacctgatgtgaagctcaggacaaaaaacagagctatgaagataatgcctggaatctctcccagcacggccaagaggcatagctgggacatggactggctttgctgtggttacatcacttgaactcagaatctaagagctcaaatctaaagacataagcctacagacaaattaaggaaatgtatatatgcagagcagctgtttgaagaccttaagacatctagtagacattataaacctgtctgccaacagacccaggcacaaatatctaaattaaattctgaagacatttctactttattttaccaataatttaaaaactatctttatttaaagattactaaaattgcatgaactgaaaagcatttgtgcttatttactttatttatgtgtactcatttatctttacattaaattgataccatgtgtaaactatatacaaacatatggatagacatatacatatatgtaatgtaacatattgcatatacatctacccataaagataaagggtgacaaaaagactgtagggttttaattttaggactttaatcatgggatgggtaaaactcactattttaaaaggacagttggattcaaattgtgcctttgtaaatgaaaaaggtaacatttatctgaagaagcccttactgagttttagaaaaaatgggtagcaaatttacctctcaaaacacagaaagggatagaatttaagcttttacaagaaggactttggatgtgttcaagaaaggttaaaaatagatgctaaggtaacacaaaaaagatagaaatttaccataagattttataaggaaactaattttattttaataggtagctttaatttggtctctgtttaccaactggaccactgagctcaggacagagcccattaaagaagagggatgacaaagtctttgcaatttttagatcctaataatttaaatatgtgaaaagaagacacaattggaagggagaggacctagacctttaaaaatcaaggatttcactgaatcccaggtccccaagaagagtaaaatgccatgggaaccataatgtgcaacacttccacagtttactttgctacaaaggcatttttttcattgtttgaactgtgtctttcttatctaaacatgcaaagatataagtagtcttctgaagtagtattcatttattataaccactgttagtcacctccaaaaccatagatttaccactgacccagcagccagcacacacacaagatgaagtatttgtacagtacaaagtaatcgctgatgaccctaaaagccagaggtcaggtaacacaacagaaaacagagcagggttttagaccagaaaggaatccattcactcgcaactcttggggttccatgtggaaaaacacagaatcttcccaaacagaaaagtctgtggcatctttcctgtttttcctaagtggtcccaggctgttcagaattctttaggtcccttcgtgtggcatcaatggtagcaagagggagataaagagaggaatgaataaaagaacaattgttaagaaaggaacagagagactaagcacatgatttaaaatgattccagtcacctgaaaaaaaaaattcaagaaacaaataagaaaagcagaaaagtgaagcagcatcattgtctggggtaaattcccaagatatattgtctcatggccacagaaaactaggtttagagtggaagtttaataggtgaaagaaagagaagaactctctgcagcagagagtggtcctggagaaatgggttgctgcttctgtggtgaaaagcagcaggttttatagatgagcttgaggaggtggtgtctgatttacgaagggcatgagatattagtcagaccaggtgttccatttgcataaggtgcaaaaagctggttagggctaggtgtgccatttgcatagggtgtgaaaatctggccgcccccaccctaatcttttattatgcagatgggttttctacctgactggcaccatgttgccagtttctttaccgtacatgtggtgaaaaaaggaaagatggaacctccatgtagaacatgtctgccccccacccaccggtagctcctttctattggcacagctgctggcattcacctgtgcaagattccagcttgcttatctatttctgcagttcgatttttcaggctgctctttgttagaaaagaaatgatttgggggctgcttttttattgaaagggaaatttcaccaaggactctgttgcttttactatctgcctaaatatcttctttctatctcctgtatcatatttccccccttaggagtagtaaccctaactgctgttaaggggtgttggacaatgactctttctggctatttcctgctgaaaaggggtgtagtgtgggaaacaacagttaagtctcctcctgaggtcaatctaagtgtcctcagaagagatgcacgtccatgtgtggttccattgtgtgccgcaccatttggagtttaatagcttctagatgagaagagataaatgttacaagatggtttagagtatagaatttgaatatgagtattaagattatcattattagttggggtactacaggccacaaccatgacagtagagtttgatacctgttagctgttccgatgggttgtaatactgatttcctccaccagatgtcactgcacctcaccagaagtgttaatatagaaacttttttttttggataagtggcattggattgggtgttgggagtaactttagtgttaactttggctaaatcttttctgtaatgattagtcctgctataaagatgataattaagcagaatattacagcaattagaattttccatccagagtttcacattgtgagtgccacagtgtatagtcatgctgcaaatagtagagtgagtataacaattcccacaagggtggtgtagtaaataattttcatgtaaaattttactccccaagatatagaatttccctttgggggtctatgaaattacaaatgtaatcccatggataatcaaaatctccctgcaagtatgtgtcaaaaagaagttctagtatgtggtggtgaatcttgagaggaaaggtagaaatgacaaagtatctggtgaggtaggggtgggactgaggaggatgagtagacctcactcatttacttatctcttatgatttttagcttaagttctcctctctcttcacattgatatctgggacattcctctaggctgtcaggagttgctccctcagctttccagactttggctcgagcgtcacgtatccaagagtcaataactgtaacttttaccactgagggtgttgaaagaacagtgtaaatttcttcccagcttgagcttagggaaggagagagagaaaggagagctttcctaataccaaatctcctgggttaaataaaggtggtcttattttctgtagttggacttctgctagttgtgttaatttctgtggaaagtgagccagagaagttacatgtttaaccaattcagaggtttaatagaaaattattggtaaggccgggcatggtgtctcatgcttgtaatcccagcattttgggaggccgagtcgggcggattgcctgaggtcaggagttcgagaccagcctggccaacatggtgaaaccccatctctactaaaaattaaaaaaaaattagccaggcatggtggcaggcacctgtaatcccagctacttgggaggctgaggcaggagaatggcttgaacctgggaggcagaggttgcagtgagtggagattgtgccactgcatgccagtctgggtgacaagagcaaaactccatctcaaaaaaaaaaaagaagaaaaaaaagaaaatcattggtaaggaaaggtcatccatacagcattttgaaagggcttaggcctaactttgaaaaggtatttcttacccacagtaaagccatgggaagaagagtgacccaaggaaagtgggtttcttggaacaattttctgaggtgtcttttgataatatcatttgtcttttctacctttcctgagaatgggggtctccaagcacaatggagatgacactgtatgcctaatgcctttgagaccccctgtgtgatggctgccttaaatgaggggccactgtcaattttgaggtacttaggtagaccaaagcagggagttattttattagctaacacttttattacctcagaggccttttctgtaaggcatagaaatgcttctacccagttagtgaaaatatctacctataccaggaggtattggatgcccttcgtctttggcatgtgggtgaagtctgtctgccagtactcccctggatagtttctcatcctttaagtttgaggaggaagaagccgcctgttggaattatttttaagacagacttcacaagcattaacaacatgctcaactgtttttaataagttatctcctgaaaacaatctctgggcacactgataagttttatcatttctcaagtgaaaatcttggtgaaggatattaagggtgttccactggctggaggctagcaagtggagtttgccatcctctgactattgccatcctgagggctgaaaagtgtacccttgagagatggctcaatctatctctgcaggggagtaatgaggcttaatttttcttatggagccttcccagattagatagccttttagtgtgttaagatcctgaggctttcttgccattgacttggctgcctgatcagctaacttgtttcctttggctaattcatctcttcccttctcatgtcccttacaatgcattactgctacctcttgtggaaggaaaactgaggataataacctgttaatttccggatggtattttataggagatccattagtggtaagactctttccttccaaattgcagcatgaacatgtatcaggggaacctgccctcaatatttcaatgtaggttctttctatttttcataagtttcagctggctgagaaataaagagtacaaagagaggaattttacagctgggcctctgggggtgatattacatatcggtaggaccgtgatgcccacctgagccacaaaaccagcaagtttttattaaggatttcaaaaggggagggagtgcaagaacagggagtaggtcacaagatcacatgcttcaaagggcaaaaaggagaacaaagatcacatgcttctgaggaaacaggacaaaaggcaaaacagaactaccgataagggtctatgttcagctgtgcacgtattgtcttgataaacatcttaaacaacagaaaacagggtttgagagcagagaactggtctgacctcaaatttaccagggcgggttttttttcccaccctaataagtctgagggtactgcaggagactagggcatatttcagtccttatctcaaccatgtaagacagacactcccagagcggccgtttatagacctccccccaggaatgcaattattttcccagagtattaatattaatattcctttctaggaaaagaatttagtgatatcttccctacttgcacgtccatttataggctctctgcaagaagaaaaatatggctctttttgcctgaccccgcaggcagtcagaccttatggttgtcttcccttgttccctaaaatcgctgttattctgttctttttcagggtgcactgatttcatattgttcaaacacacatgttttacaatcaatttatacagttagatacagttatcacagggtcctgaggtgaggtacatcctcagcttatgaagataacaggattaagagattaaagtaagacaggtgtaagaaattatgaaagtattatttgggaagtgataaatgtccatgaaatcttcacaatttattttcctctgccatggctccagctggtccctctgtttggggtccctgacttcctgcaacaagcatggagaactaagaaagcatacttggagtcagtgtaaatgttagctacctttcccttgcttaattcaagtgttcttgtaagagctatcagttagctagttgagcatttgtgcctggagagaggggcccactttcagtaacatcattcagagtgactatgacatatcctgccttatggactctgctttccaaagaaatttccatccatgaagaggctgcagtttggattttctagaggaggttccctgagatcctccctggctatgcaggtctttaccacatcttcttcatagtcatgttcaggttcctcagcgtggaaagtggttaggtttaggtgagaacaagttttcaattggattgtagacccttctaacagcagaacgtaatatttaaggagccagctgtctgttagctgaaggcttcccctagaagacagcaatcttgctacattatgtggggtataaagagttaggccatttcaaagggtcaatttggtgaccttcaataccagtagggccattgtggcaactgctcagaggcatgctggccatcctttagccatcaaatcaatcaagttctttgctccgctgtagtccgctggctgttgagttggtcctcgggcttgagttaaaactcccagggctgttccctgcatttctgatacataaagattggaggccctacctatgggaaagctgagagatggtgccttaagtaaggcttgttttagctggttgaaggcctttcgagcttcaggttcccaggttagaaaatgagttttagccacttgagtttcttttatgaggtgatataagggatgttctatctcactgtacccaggtatccatagtctgcaaaatcctgtgatgcccaaaaatctttagttgcttgagggttttagggagtgggaaaaaggaaatggacttaatcctttcttcttctaatgatctggtcccttcagacactattaagcttaggtacttcactgaggtttggcagagctgggccttggattctgaaacctctgtctgctaagaaattaagaagagttttcagtgccttcctgagaagcttcctcagttgcagcacagagcagcatgtcactcatatattgcaagagcctggcctgaggatgggaaaactcagagaggtcctttgacaacgcctgtcaaaagaagtgaggactgtctcaaaatccctgaggcagcaccatccatgttaactgggtggtctggccagagggatcttcaaaggcaaacaagtattgagagtgaggatgtaatggtatacagaaaaagccatcctttatatctaggattgtgaacaatttagttccctcaggtatttgagttagcaagatatagggattagggaccacaggatgaattgcgactgtggccttattaatgaggcagaggtcctgaactagcgtccatgccccactgagtttttgcactcctaatattggggtgttgcaggggctgttacagggtttgaggaggactcaacctattcttccttgaacggcccacgcttctggattaatattcgcttccactgggggagacaaagtgtttatcctggggctgtaaggatgttggcccccgtgtgattaaaaatatttctacctaataaaggagtgagactttcagacatacttaagaaggcatgtataaataataggtctcccactctacaactaaggggttgagaaaaatactgggttagaacctttcctgagatgtctatcacagtcatgctacaggaagaggggaggcctggattagagagaagagagaggctgcctccagtgctcagaaggaggtccacgcttcttttaatttccagtatcacctggggttcctgtgcagtaatggcagcttaagctgctggagccaggggtttgaatcctgggacccatccgtcccattggaccatctgtgaaacttattctgatctcagtgacctccatctccagggggagtctgatggaatgggcgctgtccaggttgctgccctctcctgaagcttgataatgaggaacactgatgtgtcactacagaggaggctgtgggaaaaagctgtttctcagggtggcctggatcacaagttggcggcacttttgacttggctggacctgtgaattacaggaattctgcttcatgtcagcaaccagctccttcaacttcgtgttcctctttgtagccgattctcttggcctgattcctgagcctgttctagagtcctcctcacaatacctgatggtcagggctgtgtgtggagacctaatgaagggtcttctgtgctcacacagagtgtccaggggacaggcttcatgacctcccctgcctcaaccccacaacaagatctggatagtgggccgggtcagataaagtcagaatccccagcatgggtgtgtgtcctggcagtgctgaggtctatgccccagatgaaccctcagtctctttgcaaatacatttatgttttgcatgtgttgttggctggtcagtctcatgtctctaaattcttgtatcaccctgtggataaggtaatagtctgcatataagtatataaaagctatctgatcagggtgggtgtgttttacatagtggagttatttttcaccaaagacgtttcaaaaagctgtagtagaatgtatgtatagacacacatgcatatttatatgtgttagatgttaatatatatttctataaatatatgtatatttatagaaatataaatatatattaaatttatatataatgtgccattttaaccactttaaaatgtgcaatcaaataaaattaaccacacacacagcgttacattaccatcaccactatttttcctagaaaatttttatcattttaagctaaagatctgtatcttttaaacaataactccctattttttccaccctagaccttgataatctctagtctactctctgtctttatgaatttgcctatttttgatgtttcatataaatggaatcatacatatatgtcattttgcttctcgcatttttcacttaccataatgttttcaaggtctatgaatgttccagtgtgtgtcagagttttgttcctctttatggcagattaacattctgttgtatgtgtcaccacatttgtttatccatgtgttgatgaacacttagattgttttcatattttatcttttgtgaataatgctacaatcaacattcccatgtgagtacctctttgagtccctggattcaattctttgggtatatacctaggaatggatgctgttttgtatgagaattctatgattagcttcttaagggacagcacaactgtttctcctagtggctgtacctttttataatctcaccagcaatgtatgaggattctaaattctacataaggctttcacttgttatttaacattttaaaagaatggtagccatatttgtaggtgtaatgtggtatctcattgtggctttgactttgtattttcctaatgactaatgatgttgagtttcttttcatgtccctcttgatgatatgcatatcttctttgaagaaatgtctatttgagtccttttcccatttatataaattgggtggtttgtatttttgttattgatttgtagcagttctttatatattctgggcatgaaaccattgtctatgtgatttgcaaatattatctcattctgtgtttggtctttttattttcttgataatatcctttgatgcacaaaaggcttgcatctttagcccaatttatctatttttcctttttgtttctcatgcttttgggtcatacctgagaatccattgcacatttgaggtcattaagttttacccctatgtctttttctaagatgtttttatggttatagatcttataattaactcactgatccatttttagataattgtttgatacggttggagtacagttctctaagtttattgttttgcatgtggttatctagttgtttctgcaccattacttgaaaggatgattgttcctccattaaattatcttgacacccttgtgcaaaagcaattgactttaagggtgagggtttatttctggactgtcaattctatccctttggtctctatttgtattcttatgccagcagcttctgtttttaatagttgtaatgttttgtgagatttcaaataagaaagttcaagttctgcaatttattttggcaaaattgttttggctatttcaagggtacttttttgaaaagcaaggaggccaatgttttgcaattgggaaagccttttctgtcttgttttggaggcaaattttgctgtctagggatcttttcaagaactttatcaaagtaggtgaattatcaccacttcctttgctgaggtactgtgttaaaatgtgtgttgcctcccgttgaagaattgagagaccctggaagcacttgcccatgtggtgaaggacagtgagctccataattaggggcacagaagacattgctttgggacacaatgttgtcagggtagctgtgtgcatctctacttgtttatttttttgtacaacttgcatctctgctggacatactagatattgaaatctttgttcattctcttggttctgggttggctgacctgtcagctggagctggaggacatgcctggcaggggagtgacccccatgggaaaaagcagggctcagcagagtgaaggcagctgggacccagagaagccagggaggtctgactcttagaagtcaaagaccagcaggtgggtgtcctcaggggcaaatggactgcactggtacccattgcagtggacttgaaaaaggtaagaggctttgggtatctcattttctctctcagctcttcagcaggagatttgggccctgggctggtactgtcctgcagcaggggcagggtagacaggaatggctgcatatcaggcctatgtccatgtcatcctctcaggcattgccactgaagatggagaattttgtacagaggcccagcctgggcacatgggaggagccaccttgttaaaattaatttaagaaaacagtatgcatgctttattcttctagaataattattaatgtcatgttttacaatgtatctcttaaaggaatggtgagaatcatctacataatgtatgttttaagtggtcttttctataattgcagctttcatatgttcttatagaaaccattttctttgggaacacacaggcagtatctctgtgttcatttctactgggaaatatttatgcagggtggagagagtcacatttcctaatgagagatggaaagcatctgactaccagaaagtgtccaaatgctgctgataatgatcatggggctgcaggtggaggtcaggctggaggtgggtgtcagggaaagtaattttgagagtcttttttttttttttttttacaaaatcatgggcagaagccaccacctggacccaacacatgttggaatggatgagggacagaaatagagctcagtaaattaagaatgaaatccaagagtgggcaagaggtttgagaggtcgacgggtgtgagaggtggatgggtgaatggtgagaatgttcaaaacatcttctttctccataataagggagcatttaggcccctgagtcagacagtgtccaggacagggggagcaggatgttgtcagctctcctggccaaaagtgagactccagcagtgtccagttacttggtccattttgggatttattaatattttaaagatgatccaacagtatacaattttgaaaatatacaaaaatccctatgctaccattcatagatagctaagatggccctaagatggtgagagaagcagaatggggtttgggtttacattgtatatttttttctcccaatatctacagaattccctacatcccactttgtaatgtaacccagtgggtgtcattcccattcgcagttacagacctttccggttcatggttacagacccttggaaaacccataccatttctgctgtgaggtacaggcagccatgtggcatcatctctaaacatgccttctgggacatcaaattgctgattaagtaaaagccatttcaatcgatattgaagacctcaattttaccactctcacacttgtaattcttctaccaagaggtgatggattttagtggtgatttgcttttatagattagtgtagattaatgcttctgccacgggcaattttttcattcggaaaagcatttggcaaagtctggagacactgctggttgtcagagctgggggagggagtcctgctggccttgagtgggtagagtccccagatagtgctgaacattctagagctcacagagccccaccagcatgaccactacaatgttcaatgctgaggaggagtggagagccctgatatgcctcccctagcttctctggagctttttaccttctccttccatcagtctctaccactttctcacctcagcttgctccttgaagcttaatgccttccacttgaacttgcccttagtttaagacctgctgtaatttctcaactcccctggcccctttctgatccttagcagggtgtcctctagagggcaccctcacctttcctgtagcttcccaggatccagatgcacctgccctgtgtgggcaccagggatacggccgtgtgcctgtgtccctaaaggtcctgtcactcacgaccttcgtgtgagagcaactgaggtgatattaccctcccctacttttcttggaacataaaaatttgtgcaaaccttgtagagtaaaatttcttaatgcatgtgaaaatttaaaatatatatatttttgcctcccaaactttactgggaaaaatttatcacggtcacagtcataaaaaatgacacctaatcagagttattcactgtattgtttaacagcaaaatattgggaacaacctagactttcaccagcacaatgctaattaaacaggttaccttatatctatacaacagaatatgatgcagctgcataaaaagtatggaatctttcagctatgcatatggaaacacctccatgttctgttttaattatagcatctaaacatcacagaataagatgaagtttttgtactagatctgaccttagaacattatttttactgtttttttgttttgttttttttaagagagagggtctcactctcataccgaggctgaagtgcagtggcaagatcataattgactgcagcctcaaccttgtgagctcaagtgatcctcctgcctcagcctcttgaatagctggaatcacaggcacttgccactatgcctagctaattttttgtgtttgtttctgtagagatggggtttcacccaggctggtgaaaacccaggctggtctcaaacttctgggctcaagtgatctgcccactttcactcccaaaatgctggaattacaagcaagtgtcatcacacctgattctgccttttttttttttaattggactgcagtctactcactcatcacttttcccatcaggtgatttctaattttcctctatttctctaccatatgtccatgccaaaatccagatgtatttgcttttgtctagaattaattttttttgttgttgttaaagagaagccttagaaatggtctcctagctgattttcaggattctaatcttcactgtctaagccataggtttccaactctggatactgattagagtcacttgcagggcatttaaagcctaccaatgcctgtaccatccctcaagtgtatctgatttcgctgatgtgtggtgtggcccagggattggttgtttaaaaatgctttcaaggaaaagggtcattttgcagtggaggaactttagcccagtgatcaaagttaacatccccagtaatcagagataacgacatcttagggcattctaaatatgatggatggagaaggtgcagcatcacccctgtggtattcttgtacaaagcatataacctgagtttaatcataagaaaatattagaaaagtccaaactgagggtcattctacaaaataagtcaccaacactcttaagaaatgtgaaggtcttaaaggtaaaagaaatcctgattaactttcccagattaaaggagactgagagaacagtacaatgaaatgcaatatgtgataccagattggatcctggcccagaaaaaggacattagttagaagatagaggggatttgaataaggtctgtacaggcattcattttacagtgttaataatcatttattgattttgatgattacgtgcatatctataatgttaatatttggggaagttgaatgaaaagcatatgaggactttgcctatttttggaacatttttgaaagtctgaaattatttcaaaattaaacataaaaagaaaagaaatatagatcttttagatatttctattaagttgccaaagttgaagaccatttcccagcttatcttgcctaatactgtcagagtaatcttcctggaaatgctgtttgtcatgtttgtgacctcaaagctttccagtgacttctcttatctgtaggatgaagttcccattatgtaggctgccattcagtgccctcatagcatagccctgatctcccttttttctgatctgtgttgaaagacctgaccaacattttactttcttatgtccaaaactgttcgaattttttcttgcttatgtaatgcccttccctgacttctcaactgtgggagttcagtcaaggtggtgggaaagattttagaagaaaaattataaagatagttataggaaatagtcacaaaccttcttggaaggccgggtggtttgcatagctttagtaaaaggtttggctgaaggcagctgaattatcttaaaagcttagggtgtagatacataggaatgtagaggagtttatctaaatagcttgtttactcaggcggacctaaaaccaacatttaatcctatgctcggggaactactcgggaggtcggcaatgtcaattaccttctagtggtgtttactcaagacctttgtcatttaatctgtactaaataaatgtgaacctcgctggctgatcagggctgcagctgctaactctttacccgaagggtctggccccttcttggtatcggtgagtagtgactcggccgcctagcctgctctttcgccagatatttgtgtctgagtgtatttgttcatccgttgctgggtcagggtctgctggttggacccagacagttagtgccctgtgtgaggacctggcatgttggtgcccaggtctgaggtatagctgcaaagaatcgggaaccctcgaaaacgaagaagactgtgcccttggtaagccagtaagtcagtaagtcagtaggtcattggtgcccgcttgggatctccaagttcgagggaattgttgcggctagggtttgatcatgggacaacagttatctgcacaacagaagcagtatataaaagtattcaaacagctgcttaaagccactggagcctcggttttgcaggctcaattaagggacctaatgcaaattgtatcacttaacccatggttcccagaagaaggtacactagacatagagctttgggaacaagtgggaagaaatttttttttttttttgagaccgagtctcccttcttcgcccaggctggagtgcagtggcgcgatctcggctcactgcaagctccgcctcctgggttcatgccattctcctgcctcagcctcctgagtagcagggactacaggcgccagccaccacgcctggctaatttttgtatttttagtagagacggggtttcactgtgttagccaggatggtcttgatctcctgaccttgtgatccgcccgcctcggcctcccagagtgctgggattacaggcgtgagccaccgcgcccggccgaattttttttttttttttggagacagagtctccctctgtcgcccaggctggagtgcagcagcgcgatctcggctcactgcaagctctgcctcctgggttcacgccattctcctgcctcagccccctgagtagctgggactacaggtgccggctaccacgcccgactaatttttttgtatttttagtagagacaggttttcaccgtgttagccaggatggtctcgatctcctgacctcgtgcgcaagagcaatgggtcccagtataatctttaacgctgtgggctttagtgagggcgactctggtcccattatacacagaagatcctaaaaaggggaaggagaaagaaccgtcacctattttaccacccctgagtccctcagccccactatcaccgggccaaaataacaaagaggaaacgaaggttttgcctgagacccctcctccaataaataagaaaaaagacaagggatacactacagctatgggaccctgtcttaagcaagcggcattagaaggggagcttttagcctgcccggtgatgcaaaatcactaaggtaatcaggtgtatgtttataaagagataaggaaaggcattaatggggtgcagcacaccaacatggcacatgtatatatatgtaacaaacctgtacgttgtgcacatgtaccctataacttaaagtataatgaaaaagggagaaaaggcattagaagccgaagctgcgcagccaagcgggcggagggcgaaaggaaagcctcagctgcaaaaaagctcgcagcgcccaagctgacagggttcggccaggccagcagcatccgcaccgcggtgggaggagggagcggtgcagacaaaaagccgcacagacaaaaagtggcgcctaaacaagcacagtgcggcggccgcccaggacccgcccggctgccctccggctccacatggggcccatggtaaaatcgcatgtgttctttgtatacaaggaacatcccaaattataattctctgttaaaatttaagttaaatttaaattataattatggccactgtttttcctctgctacccctgatatggctctctcaaaatcttaattgggtaagagtgacctctgaagggagaaaaattacaaagagcccataaattagttgaggaacgattaaaagccggccatatagaaccatctaacagcccttggaattcgcccatttcgtcattcccaaaagtctggcaaatggaaacttttgcatgacttacgtgttattaatgctaatctacagcctatgggaccccttcccccgcggcgattcctcaagattggtctataattgttattgacttaaaagactgtttttatactattcctctcgcagaacagagaaaaatttgcgtctacattaccagctattaaagtctgtcagattttacactgataatgctttttctttttatgtgcagaataaagacaagatgagaccaaatattcttccccctacttgtctcttcctacctgctttccctcctttaagaagatgtgtaagtgccaggcctcctgaaaaccacctcaaggacacaacaagccatagagggtttctacaacttgtgtttttccagggtatgccctcaagctctggtccaataaacctcaattgattcagacacaaacctcaactgattcagacacttgaatcaggcactcaatttggttaacattttgccaaccatgaagggggtcctcttaatggagtttagaacctttgacctgcagtgcttcttttgttcatgctcagtaccaactatagagctttagttgtgaccagtcatgtgactttctgagaattggatcctactttctcttgaggtccctgctctctccgatttttttgtttgagatctgagttttgtttcttcatggaactcctctcctcatggagctttgctcacttcctaaaaggaacatgagtttcctgctcctgtgacaatggagagccgactacagcttggtccctgctcaactaaggagctggtttggggtttttagaatttggtagctgcaggataaggcttattactacttcattctaacctctccttatgcttagagtgttcaacagtatgtaaatagtgcagtcgctatttgtgtttttggtttttatcattcttcctttggatttgaccaactcttcaccttgtctaatgtccagaacacctttcacttggtcaaatccaaatctaacaggagctctaaattatggtgaagcaggcctttaaactggctaaaattctgtaatggcagaacatccaactccacctctagaaacacctgtttgttgaagaaaataacaatattttaacccgcaatatatttctttgacaaattttgacatgtctgtcagagggccagcaaatagaagtggccctgcacagttgccttttgtggaaaaaatctacatcatagagaatcattattaatgcaggcatgtcttcccttatctggatctgggaaaaatggactgaatctgataccttaaagataaacaagtttagcattgatttttctctgagggctgctacctgcaaggttttactgacacaagaccagctttgctaactgaacttcctttctttctcccattacctgtattaccactaaaacctgatttacctccataacctcgttttggacatgcagaaatgcagaaaagtaatcagccagctaaagggtaaaaatgtattagtctcaagtttcctggcttccctctgtgcattctttccaattggatggtaaaaatcactgtttcctccaccaaattttgattaatgggagatttgtgttggactagtcttggtgtagtaattctggtgtactttttagtaatgttggggtatgagtattttgattgtttaatccatttcctcccagaagtagtcttttcctttatctctttcattctgtgttgctcataaagggaggtactggataaagttttctctcatcttgtgatatgtccttgagggcttgatttgtgaccaagtcagagcactcactcttggtctccaccatcagggggaggagtcatttttgagtcacattaggtgaccagctgtaacatggctgagaccctgaggttttttatttgttttgttttccaaatgtgttaagctcccaggagggcttgtcataagaagtcccatccaggctgggtgcggtggctcacacctgtaatcccagcactttgggaggccgaggtgggcggatcacgaggtcaggagattgagaccatcctggctaacacggtgaaaccccgtctctactaaaaatacaaaaaaattagccgggcatggtagagggtgcctgtagtcccagctactcgggaggctgaggcaggagaatggcgtggacctgagaggcggagcttacagtgagccgagattgcatcactgcactacagcctgggcgacagagtgagactccctctcaaaaaaaaaataaaataaaaaaaaaaaaaataaaaaagtcccatccatcagggacttttgtcattcccaagtcttgttgcttggatagggctgtggcaacaagagtcttttgctttcctaagcctattcctgagagtacatattttattttgtggtgggggaaaagatcattgggattggcttttcactgaagaggctgttggattgagtcacttagaatcaatacaccactggaaattctaattgtccatggccagaagatggattctttaaattgggacatctaagttaaaaaatattttagagatctcttattccaaacagttgatcagaggattgaatttcaaagaaagacacctgatagtgttatggctagccttaaaatttcttttgactaaattacagagcaaaaaatctcacctaaaacaaagttatttttttgtaagctcaaactgcttgacttagatcatctgagaaaataagaatagaagccactttaccttgtcattgaatagttaaaatcttatgcttttactgctgcagcctggatttaattttgggtcagggaaccagccttacttgttctgatatttgtgtgatttttgagtttttgaggtgctccttgacctctttggagatgcctcatacatccttggctaagccataatcttggttaaggcttattagtttcatttgggaggatacttttggttaaaaaaaaaaatcaaaagccagaaatatcagctgtttgtcctacctaaaatctgatatgaagaagtctgaggctgggcacggtggctcacacctgtaatcccagcactttaggaggctgagacaggcggatcaggaggttaggagatcgagaccatcctgtctaacacggtgaaatcccgtctctactaaaaatacaaaaaattagcctggcatggtggcgggcacctgtaatcccaacggctcaggaggctgaggcaggagaatggcataaacccaggaggcagaggttgcagtgagccgagatcgtgccactgcactccagcctgggtgacagagcgagactccatctcaaaaaaaaaaaaaaaaaaaaaaaagaaaatctgaaagtgtcacagtaggtagctggttagacatgagcagggcaggagagagctttccacccccacacactagaaatgtcaagtgatcatcaccaggtgatggtcaagtcaggtggttgttaactgtctctaaagtaataattggttgcaggtagtgccagggagatatagtctcacaatagatagaaaacacctgaaacaggtgatcagcagcttcccaataagttctcagaagttgagcaagtgggctcaaatatacacattaagaggcaacataatagagtttctggtatatgaccttctagggacttttttttttttttttttacattttagaagcatcattttttaggaactatgtttttaaattttttattattttattttatttttaaatctgtaaatcttttatttccataggtttttagggatttggtatttaattacataagttctctaggggtgatttgtgagattttggtgcacccatcacctgagcagtatacactgaattcaatttgtagtcttttatccctcacccccttcccaccattttccccaagtccatcgtatcattcttagatgatacagagcttagctcccacttacgagtgagaacatagtgtttggttttccattcctgagttacttagaataatagtctccagtttcttccaggttgctgcgaatgccattaattaattccttttatggctgagtagtattcaatcatatatatatactacaatttctttatccactcatttatagtttacattcgcaccagcagtgtagatgtgttcccttttcactgcttccacaccaacatctattatttttatttatttatttttgagatggatggagtcttgctctgtcgcccaggctggagtgcagtggcatgatcttggctcgctgtaacttctgcctcccaggttcaagccattcttctgcctcagcctctggagtagctgggattacaggcatgtgccacctcacccgggtaatttttttgtatttttagtagagacagggttttaccatgttgtacacactggtgtcaaacccctgaccttaggtgatccacccacctcggcctcccaaagtgttgggattacaggtgtgagctaccgcgcctggccaacaactattattttttcattttttgattatgaacattcttgcaggagtaaggtggtatcacattgtggttttgatttgcatttccctgatcattagtgatattgagcattttttcttatgtttgttagccatttctatgtcttcttttgagaattgtttattcacattcttagctcactttttgatgggattgtttgtttgtttgctaatctgagtttcttgtagattctggatattggttatctttcagatatatagattgcaaagattttctttcattctgtgggttatatgtttagtctgctgactgttgctttgctgtgcagaagctctttagtttaagtctcacctatttatttttgcttttgttgcatttgcttttgggttcttggtcatgaacttttcgcctaagccaatgtctagaagggtttttccaatgttatcttctagaatttttatagtttcaggtcttagatttaagtcctagattcattttgagttgatttttgtataaggtgagagatggggatccagttttattctcctacattcggcttgccaattatttcagcaccatttgttgaatagggtgtcccttacccattttatgtttttgtgtgctttgtcaaagataagttggctgtaagtatttaggtttatttctgggatctgtattctgttccgttggtctatgtgtctatttttataccagcaccatgctgttttggtgactatggacttagagtattgtttgaagtcaggtgatatgacaccaccgcatttgttctttttgcttagtcttgctttggctatgtgggctcttgtttggttccatatgaattttagaattgttttttctagttctgtgaagaatggtggtggcattttaataggacttgcattgaatttgtagattgcttttgtcagcatggtcattttcacaataatgattctattcatctatgagcatggggtgcattttcattttttgcgtcatctgtgatttctttcagcagtgttttgtagtttttcttgtagaggtctttcacctccttgtttagatacattcctagttattatttttttataactgctgtcataaaaggggttcagttcttgatttgattctctgcttggttgctgttggtgtgtagcagagctactgatttgtgcgcattaattttgtatacagaaactttgctgaattcatttgtcagttctaggagctttttggaggagtctttagggtattctaggtatacgattatatcgtcagcaaacagagacagttttacttcgtctttaccgatttggatgccctttatttatttcccttgtttgattgatttggctagggctttcagtactctgttgaataaaagtggtgagagcaggcatccttttcttgttcccctgctcagagtgaatgctttcaactttttctcattcagtatcgtgttggctgtgggtttgtgtgccaattttgctgagagttttaatcataaaatgatgctggatgttgtcaagtgcgttttcagtgtctattgagaggatcatgtgatttttaaattatgtttatgtggtgtaccacattattgacttgtgtatgtggaaccattcctgcatccctagtatgaaacctacttgatcatggtggattatgtttttgatgtactattggattcagttagctagtattttgttaagaatttctgcatctgtgtgcaccagggatattggtctgaagttttctttgttatgtcctttcctggttttggtattagggtgatactggattcatagtatgatttagagagaattctctctctttctagcttgtggaatagtgtcaattaaattggtaccacctcttctttgaatgtctggtagaattcagctgtgaatctgtctggtcctggaatttgttttgttgttaattttttaattatcttttcaatcttgctgctttttgttggtctgctcagggtttctaattctttctgatttaatctaggagagttttacatttccaggaacttattcatcccctctaggttttctagtttatgcacataaacgtgttcatagtacctttgaatgatcttttgtatttctgtggcattcgttgtaatagctcccatttcatttctgattgagcttatttggctcttctctcttcttttcttggttaatcttgccaatggtctatcaattttatttatttttccaagaaaccagctttacattttatttatattttgtattattttgtttcagtttcatttagttctgctctgatcttggttattttctttcttctactgggtttgggtttggtgtgttcttgtttcttgagtttctagaaatgtaaccttagattgtctatttgtgctctttcagtctttttgatgtaggcattaaaggctatgaacttttagcatggtctttgctgtattctagatgttttgataggatgcatcactattgttcagttcaaagaatttttaaattttcattttgatttcatatttgacccaatgatcattcaggagcaagttatttaatttccatgtggttggttttgaaggttccttttggagttgatttccagttttattctactgttgtctgagagagtacttcatataatttcaattttcttaaatttattgagacttgttttgtggcctatagtatggcctatcttaaagaaagttccatgtgctgatgaatagaatgtatattctgtggttgttgggtagaatattctgtaaatatctcttaagtctatttgctcgagggcatagtttaaatctattgtttctttcttgactttctgtcttgatgacctgtctagtgctgtcagtggactaatgaagtccctcactattattgtgttactgtctatctcatttcttaggtctagtagtaatagctatataaatttgggagctctggtgttaggtgtatatatgtttaggattgtgatattttcctgttggacaagtcctgttattattgtataatgtccctctttgtcttttttaactgctgttgctttaaagttagtttttttgatataggaatggttactcctgctcactttgtggccatttgcatggggtgtctttttctacccttttaccttaagtttacatgacactttgtggttaggggagtctcttgagggctgcagatacttgcttggtgaattattatcaattctgcaattctgtatcttttaagtgaagcatttagaccacttacattcaatgttagtattgagacatgaagtactgttccattcatcctgctatttgttgcctgaataccttggttttatatatttatttattgtatttttgttttataggtcctgtgagattcatgcttaaagaggttctgttctgatgtgtttccaggatttgtttcaagatttggagctccttttagcagttattgtagtgcaggcttggtagtggcaaattctctgagcatttgtttgtctgaaaaagactgttatctttcctttatttatgaactttagttttgctggatacaaaattcttggctgataattttttttaaggaggctgcagataggtatgcatgctcatttgaggtgttcttcccttattaaagattgctaaaatcacatgtgttgaaaagcatttgggattatttacttaattgatgagtactcatttatttttgcattaatttgataccatgtataaacaatatataaacataggtatggacatatacatatatgtgatacaacatagaacatatacatgtgcacataaagatagaaggagacagaaatactttagatttttgattttaaaactatgcatagaacccataaaactcactattaaaaaaaagttggatttaaattgtgcttttgtaaatagaaaaagttaacatttatctgaggaagcccttgctgagttttagagaaagtaggtagtaaatttacatctcaaagcacagagagagagagagagagaaggaatttgggtgtgttcaaggaagattaaaaatagatggcaaggtaacacaaaaatgatagaaatttataacaggattttataaggagaccaattttatttccatacatagcttttattttggtctctattttccaactgtactccagggaacacactacacaggctcccttaagtgctggtgggccactgcacatgcagacagcccactttaagggaagaatcgggggagaagagatgcagaccccagaattatgccaacatacgaaagcctaagtcaaaggtcaaaccacacacttgaaatctcatcgcctgtttggccctgttttaagtgtactttactttctttaatttctgctctaaagcttttaaataaactttcactcttgctctaaaacttgtctcagtcttttcttctgctttatgactcttggttgaattctttcttctgaagaagcaagaattgaggctgctgcagacttctacagatttgctgccactaatatactttagtgccattctacatgatagaatatatatatattcttatatttatacatagatatataatatatgtattcatagaggccttgaatctacattcttgctccactttatgtaaacaatccaggtataagactaaaacttattttggaaatacattggtcccatatgatttctatttcataaaaatgggagacaggagggggaaaattatttttcagaagaaaacaacagaacaatggttattgaattttagatctgttctttttttcttgaactttgttatttacctacaatttggactgaatcctaaattttttcctggctacaaatttcaaaactaatggtttcagaattttcttccatttttcttccattttggtatattgtaaattaaaactgtgatttttaaatttttatctttttttattacacttttaagttctgggatacatgtgcagaacctgcaggtctgttacataggtatacacgtgccatggtgttttgctgcacccattaacccatcatctaccttaggtatttctcctactgctatccctcccctagtcccccacccctcaacaggccccagtgtgtgatgttcccctccctgtgtccatgtgttctcattgttcaactcccacttatgagtgagaacatgtggtgtttggttttccgttcctgtgttagattgctgagaatggtggtttccagcttcatccatgtccctgcaaaggatatgaactcatcgttttttatggctgcatcgaattctgtggtgtacatgtaccacattatctttatccagtctatcattgataggcatttgagttgattccaagtctttgctattgtgaatagtgctgcaataaacatatgtgtgcatgtgtctttatagtagaatgatctataatcctttgggtatatacccagtaatgggattactgggtcaaatgatatttcttgttctagatccttgaggaatcgccacactgtcttccacaatggttgaactaatttacactcccaccaacagtgtaaaagcattcctatttctccacatcctctccagcatctgttgtttcctgaccttttaatgatcaccattctaactggcatgagatgatatctcattgtggttttgatttgcatttctctaatgaccagtgatgatgggctttttttcatatgtttgttggtcacataaatgtcttattttgagaagtgtctgttcctgtgctttgcacactttttgatggagttgtttgtttttttcttgtaaatttgtttaagtttcttgtagattctggatattagtcttttgtaagatggatagattaaaccttgcaagctgaaactagacgacttatgtaaacttctggagaaatcatagcaacttatatataaacaacttttgtgcctgctgatgtggactacacaaaaggttcacatgaacactggattcagactgcaattcagaaatgtgtcagattgccgttgtaattggaagatgcttcagaaactctagaaaacctagtctatagactgctccagacattacaggtgagccaacatacaactgaaagggttcaagcggtgtttgccaaacgaattgctctaattgaagcagcagttgtgtgactttaataaggttccaggattatactgtcccttttttgctgtgacttccctttgcccttttctgatttgtcttcatccccttttccatggggcatgacttcttaagaatgagccttcctagtgatgtaggatgagatgaaacatacagtcacaaagtcatgtcttctacaatgctttctctgaaagcttttgaagaatcggggggccaggtgtgctggcacaggcctgtaatcccagcactttgagggtctaaggcaggaggatcacttgaaaccaggagtttaagaccagcctgagcaacaaagggagaccacgtctctacaaaacataaaataaatcaaattagccaggtgcagtggtgcatgcctatagtctcagatacttgggaggctaaggtgggaggaccgcttcagcccaggagttcaaggctgtagtgagtgcactccagtctgggtgacagagcaaggttgtgtctctaaaagaaaaaaaaaaaaaaaaaaaaaaaaaaagaaaagaaaaagaaaggggtaaacaggaaagccaaagatctcgagcatctccagatgattgcctgaacaaattgttttttcttggcttccaaacctttcaagatgtatattactttgtaaaagaaagacatgccaattgtaactttaagtgagcaatcaaaatctagctcctaaaactgaagtattttaactctcattctgataatttattttctgaggcacagaagaaagacaagattaggtcaattgtttttatgcccactccatctcttccaacctgccttctcccctttaatcaaatgtataaacactaagcctcctgaaacctcttcagagaaaacacaagccacagaggttttttgcaactcatgttttcccagggtgcaccatcaagctctggctcgataaaactcaattggtcaagacccttgcctcagtcagtcattctggataaccaccatgagtcctgcaaagcccttcagtaatctattgcctgcctaggtgatgtgtacccaggtgagtcaggtcttcatgagtcaaacactcgtcttccttttctgtctttcccaaccctaccactcagtgctgtgtgctctgatctgaccccagctcccaggttgtttgtattggtctaagaaagcaagaccaggaggggcaggttgagaaggaagtaagaggccaacagccatggaaagtggcaggtggggctgtcattgctcaaagccacacaccctgggtgcattttgtgaatttttctggattcggaatctttttcctgtgtgtctgtctagaaactcaccttcttcctactttcttctcagtacactttctgtttctagtgcactcatttatgtccagagaatggccatgcaaatagttgacaatagaataaaaaatgactttttatgagacttggaagctggcctttcttttttccaaaagagattgaggtttccataaaaactagcttttatgcagggctgtgtagttgtgagtgtagttttagggaacaggtgcataagtgaagggtgagacagaaaacaaaatgctggctgtttgtcaaatcctgaaagtaggggggctgaaatcatttttgaaggaggatgtcattcaggagaccttgtacatcttagagtgtcctcttaccagatgaagtggaggatgaggttgaattagggagttaggtgacagtgggcacatacttctctgcctcagttttttttttaaatctgtaaaaatggggatgataacactcaggattttttggtgaggactgtagttacctggaaagcccttaggatagtgcccggtgcatagtgagtgctgcatcagtgtgagctattataattatgggaataggcaaaggtgccaccctggccatccagagtggagaggtattttctggtcagggtccaggcaggccagctggagatgaagctgattagtggggaagcttaacttccaggagcggaagaatttaggaggagtaaacagaatgcacaacattctgtaaacatgcctttacccaacagtaggaatactcagagtgggtgtggcttccatggcaatcattatctcctgggaatctaagaatgtgtcctagagtcaagtggctttgatgtaagccaaacctggaaatgggcttcagggctgccttgcacatagcattcattcatcttgaaaaaggaaagcattcatcttgctaaaggaatcccctcttctggtccaggccattatttttgcttttgtactatcctaatttttaaggtgtaaggagaaagaccaaagaataaaataatgaagtacctgtatgaaataacagggtagaattgagactggtacgtgtaagttaagagaaattgtgtataaatttttgtgaacagaaaaaggatttcttgttgcaaactgacctctctatataaataatacccattgccttgaatggatggcagaccgcatcacaagaacattccagcagagtcatgagagaatgggtagtgtggcttctttaattggcaggttagactgagtaagttactgaagagaaaggagttgaaggagaagatgggtgagggcaagaaaaatgggaaggtgaaaggaaaggactgaaaggaatgtttaccaagggctcatcaggtaccaggctctgtgactaatgtcttacacatgttaatttactcttccactgtcattttctgatgcagtaagagtcagtcttacactacaggtgaggaaagaggctgagggaggtcaaatgagtggcccagggtcatccagccacttcatagcagagctagtgtgtttcactgtggtttgtgcagacagaaaagtgagacatagaaggaaggcaaaacatttttgttgtgggtgatgtttatgaaagtgacccgtatgaggcagaataatggcctcttaaaaatgtccacatccgggccgggcgcaggggctcacacctgtaatcccagcactttgggaggctgagacggtggatcacgaggtcaggagttcgagaccagcttggccaacatggtgaaaccccgtttctactaaaaatgcaaaaattagctgggcgtggtggcgggcgcctgtaatgccagctacttgggaggccgaggcaggagaatcatttgaacctgggaggcggagattgcagtgagctgagattgtgccactgcactccagccagggcaacatgagtgaaactctgtctcaaaaaaaaaaaaaaaaaatccacatcctaactcttggaacacatgcatttacttttcttggcaaaaacactgttcaaagttaatgaagttgagtatcttgagatggaaagcttattctggcttatctgggtggctcccagtttcatcataagtgtccttgtaagtgaaagagaaaggcaggagggtcagggtgagaaagatgcagcctgagagactccactggccattgcttcctgtgaacatgtgtgataagacaaaattacaactaatttagttacagatgtaattggcttttatttgtgatttatgatttggggcagctctccctctacagatgcctcagcatcccaagtagctgggactatattgcgggatctggccagcagcctgcaatgcaacggggctctttctttgttcccaggcagatcagcaggttgagaaataaaagacacacacaagatagtgaaagctgggtccagaggggtcaccgccttcttgtcctgcaatgctgccaatgcactggatataccagcatttattattaagtttagtgagagcggggttaggttagtgagggatttagggtcatttataggctctccacaagcgttgcattccattcccagagctatggacatctgcttttctgggataggaatcttggtaatgtgaaacctccctgactgcacgtctgttcataggctctctgccgggggaagcacatcacgtgctgttggctcattctggcagtccaacctggcatttgtctttacacaatcctgcatgcaattttgtatttacaataatcaggagcatttcatcttttattccatagcaatagtttcagggggtctccctacatctcccccttttctctgatttaaatgaaccatagcaatcatagcttggcactgatcacgattggattgaagaatatttttttccaattttacatatgaacaataaaccaatagcacaaattatacacagaacaaaattaacgatagtggatcctcccaaagatattacctattgaatggggttgagattagataacccctcagagatactgtctaaaacttcagcactgggtaaagcagttaagtgtgcttgagaggcttcaaaaatctgttcttttagcttgcttatgtctaaacttaaattatcttcacttccttgtaaatgggattttactgattcccaattatgaacagactcattatattggaactgagttatacaaaaatcagaagtattcctatcacactaaatttgtaatctatgttctaaactcataattctatctcccatccatataacagaagcacatcaagcgctgtaggctcattctggcagccaatctggcattgtctttacacaatcctgcattcaactttgtattgacaataatcaggagcatttcatcttttattctgtaacaatagtttcaggggttctccctacaggactacaggtgtgcaccaccatgcctggctaatttttgtatttttagtagagacagggtttcaccatattgaacgggctgatctcgaactcctgacctggtgatctgcctgccttggcctcccaaagtgctgggattacagatgtgagccactgcgcccagcccataaatcacacatttctttgagtttttgtaattccagcccaagagaaaccatttgatatttcaagaatggctgcacacaaatattttcacacaaataaaaacatctgtagattgcaccacacgagggagactaccagtatgactatcaggaggaaaatatcaagagtttggaatatgcaccttaggaaagatgcaaaccaactacaataggatagatcaaagaagaagccagaagagtctagtcattttaaccagtcagcaaatttattgatttttacaaccaagtctttataatacccaatgtatttatccatgtgcaacaagaagtgtcagaaactgcacaggctccccactgttcagctggtagagagcaattctattatctattattgcatgtctatgttaaattaaaaaaggggaggtgccaagatggccaaataggaacagctccggtctacagctcccagcgtgagtgacgcagaagacgggtgatttctgcatttccatctgaggtaccgggttcatcttgctagggagtgccagacagtgggcgcaggtcagtgggtgcgcacaccttgcacgagccgaagcagggcgaggcattgcctcactcgggaagcccaaggggtcaaggagttccctttcctagtcaaagaaaggggtgacagatgacacctggaaaatcgggtcactcccacccgaatactgcccttttccgacgggcttaaaaaacggtgcaccaggagattatatccgtcaccaggcttggagggtcctatgcccacggagtcttgcagattgctagcacagcagtctgagatcaaactgcaaggcggcaggaacccaccacagctcaaggaggcctgcctgcctctgtaggctccacgtctgggggcagggcacagacaaacaaaaagacagcagtaacctctgcagacttaaatgtccctgtctgacagcattgaagagagcagtggttctcccagcacgcagctggagatctgagaacaggcagactgcctcctcaagtgggtccctgacccctgatccccgagcagcctaactgggaggcacaccccagcaggggcagactgacacctcacacggcagggtactccaacagacctgcagctgagggtcctgtctgttagaaggaaaactaacaaacagaaaggacatccacaccaaaaacccatctgtacatcaccatcatcaaagaccaaaagtagataaaaccacaaagatggggaaaaaacagagcagaaaaactggaaactctaaaaagcagagcgcctctcctcctccaaaggaacgcagttcctcaccagcaacagaacaaaactggatggagagtgactttgacgagctgagagaagaaggcttcagacaatcaaataactccgagctacaggaggaaattcaaaccaaaggcaaagaagttgaaaactttgaaaaaagtttagaagaatgtataactagaataaccaatacagagaagtgcttaaaggagatgatggagctgaaaaccaaggctcgtgaactatgtgaagaatgcagaagcctcaggagccgatgtgatcaactggaagaaagagtatcagcgatggaagatgaaatgaatgaaatgaaacaagaagggaagtttagagaaaaaagaataaaaagaaatgagcaaagcctccaagaaatatgggactatgtgaaaagaccaaatctacgtctgattggtgtacctgaaagtgacgaggagaatggaaccaagttggaaaacactctgcaggatattatccaggagaacttccccaatctaacaaggcaggccaacattcagattcaggaaatacagagaacgccacaaagatactcctcgagaagagcaactccaagacacataattgtcagattcaccaaagttgaaatgaaggaaaaaatgttaagggcagccagagagaaagtttgggctacccacaaagggaagcccatcagactaacagcggatctctcggcagaaactgtacaagccagaagagagtgggggccaatattcaacattcttaaagaaaagaattttcaacccagaatttcatatccagccaaactaagcttcataagtgaaggagaaataaaatacttcacagacaagcaaatgctgagagattttgtcaccaccagacctgccctaaaagacctcctgaaggaagcactaaacatggaaaggaacaactggtaccagccactgcaaaatcatgccaaaatgtaaagaccatcgagactaggaagcaactgcatgaactaaggagcaaaataaccagctaacatcataatgacaggatcaaattcacacataacaatattaactttaaatgtaaatggactaaatactccaattaaaagacacagactggcaaattggataaagagtcaagacccatcagtgtgctgtattcaagaaacgcatctcacgtgcagagacacacataggctcaaaataaaaggatggaggaagatctaccaagcaaatggaaaacaaaaaaaggcaggggttgcaatcctagtctccgaggaaacagactttaaaccaacaaagatcaaaagagacaaagaaggccattacataatggtaaagggatcaattcacaagaagagctaactatcctaaatatatatgcaccgaatacaggagcacccagattcataaagcaagccctgtgtgacctacaaagagacttagactcccacacattaataatgggagactttaacaccccactgtcaacattagacagatcaacaagacagaaagtcaacaaggatacctaggaattgaactcagctctgcaccaagcagacctaatagacatctacagaactctccaaccaaaatcaacagaatatacatttttttcagcaccacaccacacctattccaaaattgaccacatacttggaagtaaagcactcctcagcaaatgtaaaagaaaagaaattataacaaactatctctcagaccacagtgcaatcaaactagaactcaggattaagaatctcacttaaaacaggtcaactacatggaaactgaacaacctgctcctgaatgactactgggtacacaacaaatgaaggcagaaataaatatgttctttgaaaccaacgagaacaaagatacaacatactagaatctctgggatgcattcaaagcagtgtgtagagggaaatttatagcactaaatgcccacaagagaaagcaggaaagatccaaaattgacaccctaaaaacacaattaaaagaactagaaaagcaagagcaaacacattcaaaagctagcagaaggcaagaaataactaaaatcagagcagaactgaaggaaatacagacacaaaaaacccttcaaaaaattaatgaatccaggagctggttttttgaaaggatcaacaaaattgatagaccgctagcaagactaataaagaagaaaagagagaagaatcaaatagacgcaataaaaaatggcaaagaggatatcaccaccgatcccacagaaatacaaactaccatcagagaatactacaaacacctctacacaaataagctagaaaatctagaagaaatggataaattcctcgacacacacactctcccaagactaaaccaggaacaagttgaatctgtgaatagaccaataacaggatctgaaattgtggcaataatcaatagcttaccaaccaaaaagagtccaggaccagatggattcacagccgaattctaccagaggtacaaggaggagctggtaccattccttctgaaactattccaatcaatagaaaaagagggaatcctccctaactcattttatgaggccagcatcatcctgataccaaagccgggcagaaacacaaccaaaaaagagaattttagaccaatatccttgatcaacattgatgcaaaaatcctcaataaaatactggcaaaccaaatccagcagcacatcaaaaagcttatccaccatgatcaagtgtgcttcatcgctgggatgaatggctggttcaatatacacaaatcaataaatgtaatccagcatataaagagaaccaaagacaaaaaccacatgattatctcaatagatgcagaaaaggcctttgacagaattcatcaacgcttcatgctaaaaactcaataaattaggtattgatgggacatatctcaaaataataagagctatctatgacaaacccacagccaatatcatactgaatgggcaaaaactggaagcattccctttgaaaactggcacaagacagggttgccctctctcaccactcctattcaacatagtgttggaagttctggccatggcaattaggccggagaagaaaataaagggtattcaattaggaaaagaggaagtcaaattgcccctgtttgcagacgacacgattgtatatctagaaaaccgcattgtctcagcccaaaatctccttaagctgataagcaacttcagcaaagtctcaggattcaaagtcaatgtacaaaaaatgacaatcattcttatacagcaacaacagacaaacagagccaaatcatgagtgaattcccattcacaattgcttcaaagagaataaaatacctaggaatccatcttacaagggatgtgaaggacctcttcaaggagaactacaaaccactgctcgatgaaataaaagaggatacaatcaaatggaagaacattccatgctcacgggtaggaagaatcaatatcgtgaaaatggccatactgcccaaggtaatttacagattcaatgccatccccatcaagctaccaatgactttcttcacagaattggaaaaaactactttaaagttcatatggaaccaaaaaacagcctgcatcaccaagtcaatcctcagccaaaagaacaaagctggaggcatcacactacctgacttcaaactatactacaaggctacagtaaccaaaacagcatggtacaggtaccaaaacggagatatagatcaatggaacagaccagagccctcagaaataacgctgcgtatctacaactatctgatctttgacaaacttgagaaaaacaagcaatggggaaaggattccctatttaataaatggtgcttggaaaactggctagccatatgtagaaagctgaaactggatcccttccttacaccttatacaaaaatcaattcaagatagattagagacttaaatgttagacctaaaaccacaaaaaccctaggagaaaacctaggcattaccattcaggacataggcatgggcaaggacttcatgtctaaaacaccaaaagcaatggcaaccaaagccaaaattgacaaatgggatctaattaaactaaagagcttctgcacagcaaaagaaactaccatcagagtgaacaggcaacctacaaaatgggagaaaattttcacaacctacttatctgacaaagggctgatatccagaatctacaatgaactcaaacaaatttacaaggaaaaaacaactgcatcaaaaagtgggcgaaggacatgaacagacacttctcaaaagaagacatttatgcagccaaaaaacacatgaaaaaatgctcaccatcactggccatcagagaaatgcaaatcaaaaccacaatgagataccatctcacaccacttagaatggcaatcattaaaaaggcaggaaacaacaggtgctggagaggatgtggagaaataggaagacttttacacttggtgggactgtaaactggttcaaccattgtggaagtcagtgtggtgatgcctcagggatctagaactggaaataccatttgacccagccatcccattactgggtatataccaaaaggactataaatcatgctgctattaagacacatgcacatgtatgtttattgcggcattattcacaatagcaaagacttggaaccaacccaaatgtccaacaatgatagaatggattaagaaaatgtggtacatatacaccacggaatactatgcagccataaaaaatgatgagttcatgtcctttgtagggacatggatgaaattggaaatcatcattctgagtaaactatcacaagaacaaaaaatcaaacaccgcatattctcactcataggtgggaattgaacaatgggaacacatggacacaggaaagggaacatcacactttggggtctgttgtggggtggggggaggtgggagggatagcattgggagatatacctaatgctagatgatgagttggtgggtgcagcgcaccagcatggcacatgtatacatatgtaactaacctgcacactgtgcgcatgtaccctaaaacttaaagtataataataataattaaattaaaaaataaattaaaacagggagtgagaataggtaagtatagaagtggaagcctaaaaaaaactccatacatttgaggaaaaagttgtgttacagaggcagctaacatcagcctttgggtggactaaaggatctctttttatgtaaaaatgcgtgggctgggtgcggtggctcacgcctgtaatcccagcactttgggaggctgaggcgtgcagatcacctgaggtcgggagttcgagaccagcctgaccaacatggagaaaccctgtctctactgaaaatacaaaattaggtgggcgtggtggcgcatgcctgtaatcccagctactccggaggctgaagcaggagaatcaattgaacccaggacgcggaggttgcagtgagccaagattgtgccattgcagtctggcacgggcaacaagagcgaaactccatcttataaaaaaaaaaagtgtggttgacatgatatatcggacactgttaacttactctcagaagctacttcttgtgaaatcctaagtacagcattattctgggaagcaaaggagacaggcagaagcaaggacaaattaagagaggtaacagtctcatcatgactgatagtcttgttctaacatcttgagaaaagctgtccacagtgtaaagtcatcaacttgtcgtggtttgcagtttgagtgtctctaagttatggtgttgaacatttggtgagctcttagtggcccacacttcagacacgagggtttctccatgaaatttacattgagttgtccatctccatcttatatggcttcaggaacagagctgctcttgttcttaatgatttcactggagaaaattaaattggaagaactaaaagaattcagggtccagtccagtctaccagtggattataagtactcaaagataatgaacagtggttcaatctggtaacaggtgtactacagtttttcttttcaacatagtttttctctttataggagtctctatttttaccaaagataattccagtaggatgaactcttttgcaaaataggttgagtctcaccgaacttgcccagattttttacctaagtgcggcaagagtagcgatggaccatagaggctctttttaaactcccctttgctggaagtttttagtaagaatctcagattaaacttccaaaaacctcttgagactaagaagccaaaccaaggccaacttcagactttgcctgcattccctatgggtttattctatgtatattctcaaatataacatcccagtcaaagccttggtaatataaccaatgttttcaaatgtgtcctgttataaagagagcagatccttactgaacttgtgcagataactttattaccataaacatatgaatactcctgaatagtttcccaattctggggcacttagggagcaaaagcaaatgtttcaatttttgtttacaaaagtatactttaccaattgctgaagaaaaaaagtgcataaatctggagaataaaacattcaaagaatcagcacattttcaaatagaaaattatgaaaacattgttttgactatttagtccaataaaattgggtttttttctttgtcttgaatttcatgaagtatcagcctgttcattaaaattttgaaagttcttagtccagtggtatgatcttgaagttatcaggaacttgtattcaagagtccttgtcagagtcttttcataaatctccttgaacaaaaagcaattttggactgtagctgatggtaaatactttgaggaagaatgaaagcaactgtctgggaatgacaaagatttaaaatgactatggttaaaaatctaatgagaatttattatggtaaagacacagctcacaaaatctagttacttctgtggcatatgacactatgataacatatttgatttccagaaatttcatataatttttagaatactcattaaaaaaattttttttttgagacggagtctcactctgtcacccaggctggagtgcagtggtgcgatcccagttcactgcaagctccgcctcccgggttcctgccattctcctgcctcagcctcctgagtagctgggactacaggtgcctgccaccaagcccggctaattttgtttttgcatttttagtagagatggggtttcaccgtgttagccaggatggtctcgatctcctgaccttgtgatccgcccacctcggcctcccaaagtgctgggatgacaggcgtgagccatcgcacccagcctagaatactcatattattaacattcccataaatattatttagaggaggtttagcatcacttatcacttatttgaaaatgctttctatataatttaacttatcaaataaagtggcttttccattcagcttctgtttgttaactggattactgagttcttggtgtagcccattcataaatagggccaaaaaagtatagtcttatgtatgttgaaaaaggtccttaggtaattccagtacttccagctgaacatcattgatttagttttaagttctacctattacaacaagagttctccatccttgttacatgttagtagtgtcagggaagacttaaaaattaccaatgcctgggtccctctccagacctttaaactggaactaatgggtggggcttgagcatccacttttaaaaatgttttccagtgattccaatgtgtagctctatttcccatcagatttctctgatttcttgtggcattcaattttttctattttggtatcatgattattttcaggtctcatttcctgtcttaggctttatgtctcctggcgtagggaccttgccttcatcatttctgtatcttttttaaacacatgaactggtcatcaggaaaagatctcaaccacacataggttgtgttctgagtctcaggttcacatgttaatcctaaagtcttagttctccacgaggtcagatgttgcttgtgatgaagggtgtggttaagtctgcagtgcagatggtagaggggatttcactctgttttcagacatagcattggaactaagaattttatatctatatgggtgaagggacaggggtgtgtaggaagacagttctaattaggatggaggaattatactaggaagtagcggtaaaggaagtgagaaggcttagtaaatagaagaaatgtgaacttatcaaagtggctagagtagacccctggagattcttgattaagtgaattaactagattttagaaaggtaatgaggcagtcatatgcaaggaagatttcaaagtctggagacaagaagtcaagcaatactttgagaagtggttgagctttatgggaatggagagaattacactattgagagatgttaaaaataatgaagagggtttcaccatgtgaaattgtgtttttcatttgaatctgagaaacaaatgagcagagagagaggctggagataattatgtctaaaagacagtggggtacagggagcataaaggccagggagaaagggaactgcaggaattagtgctgagaagcaggagttagtggaggaaggaggagatccagtcccagatacaggcaaataagtcttttccctctcccaagcatggcagttagccctgcaggaaccaggataagaggaaaggtcatcatacctgccagtcttcctgaaatacagaaatgacatcacggctgctataatggattaaggccaggaagatgtcctgttcctgaaggagctgtcatggaaaaaaaagaaaagaaggaatgaagatgatgttattttacatgggggagcctcaggaacaagcatgtaacatgaggtactctataattgtttcttcaaggactacgttatttctgttggaaaattgataggagatgattatattcttgcagtttttttttccctctcaccctgtttctcagttggtgatcagtcctctgtcaattctctactgtgctcagatatttggaaggctttcagatgtgagaaaggctgattgctattttctatgtcattagaacttgccacctttgcaccttttcatggttgcatctttttctcagtgtctctgttgtggcagtcatgaatgagaccctgccaggtctccatggcagagacttgattgacagaaggcccaggtcagtgcatttcaaattcaccacctcctttgcacagaaagcttctttcctacaggctcccagcaagggcgtgaaagcaagtctagttctctgaggctctctttaactctaatgggtgactggttggaggattccccatcagccttgcaaaaactcttataattgaattggtacctaaaacttctttctctttctttttcacaggaatcagctctgcatagtggtctgtgggttctcccgtactaccttcatgcctgccccacattccctcacaggtgtcttccctgataagttatcttgtatgtctaatcccatcttggatgcatctcagtcagtaaaaactaacataccaggcttgattctttgcacttagctttttttctttctctcccacaagtagtcagtaaccatgtcctagtgttttatgtgttacctctttttccatatatatatatatggaaaaaggaaggtactgttgaggggcacttcctatgtgccaggccctgtgctaaatactttccctgtatctcatttaatccacacaataaccctgtgaggtagacattatttccattttgccgatgaaaagacagaagcttagagtggtgtaaaactttcctggtgtcatatggctagtgacaggtggatctgagatttgattctaggactatttgacctctaggctaatgatgatggtagtcatatagcagctgacattggttccactgtgtgtggcatctcgttttattgactgcattaaacctttaaaagaaaggtatgaagaaagcactcttattgcagttttcaggtgaggtatcagaggttcagagaaattgagtcttgtgcaagaaatttataactgtaaactcttacattaaaaaagaagaaagatctcaggtcaacaacctactttaatacttcaggatatgaaagaagaacaaactaaacccaagcacagtgaatgagggaaaaataaggattagagtggatataaataaaatggagaatggaaaaagaatagaggaaattaatgaaaccaaaagttgattcttcaaaataaaatcaacaaaattgacaaccattaactagattgactaagaaaaaaagagaaaagtttaaaattcctaaaatcagaaatgaaaatggactctgagcatggtgggtcatgttttaatcctagcactttgggaagtcacagcagaaggatttcttgagaccaggtgtttggaccagcataggtaacctggggagaccctgtctctacaaaaaaataaaaaagccaattagctgcgcatggtgacatgcacctgtagtcctagcatcttgggaggctgaagaaggagaattacttgagcccaggaggttgaggctgcagtgagccataatcacaccactgtattccatcctgggctggcctacagagtgagagcctgtctctctctcttcaacaacaacaaccaaaaaaaaaaaaaaaaaaagaaaaaagaaaaatgaagcgattactaccaattctaataaactaatgattatgaaagtactataaataattgtatgccaataaattggataacctagatgaagtagacaaacccctagaaacacacaaaaatatgaatggaactataatcagtaataagattgaatcaataaaacatttgatgaaattcaatattttttcataataaaaactttctaagaagggaaggaaaccacctcaacgtaaaggcaatatgtgaaaaacccaatgctaacatcatactcaacggagaaagactgaaagctttccctgtatgagcaggaacaagacaagggtgcctgcttttgacacttttattcaacatagtattgaaaggtctagtcagaaaaattaggcaagaatttaaaaaaagacgttaaaattggaaggaaggagtaaaattatttctgtttacagataacttgaacttatatgtagaaaatcctaaagatggaacaaacctattagaattaataaataaattcagtaatgttgcacaatacaaaatcaacattcaaacatcagttgtatttcaatacactaaccatgaacaatctgaagggaaattaagaaaaaaaatttcaatttatattaacatcaaaaagaataaaatatttaggaatgagtttaaccaaagaggtaaaatgattatacctgaaatctacaaaatatggctgaaagaaatgaaagatgacatcaataaattgaaagacattttgttttcatgaattggaagactcaatattgttaggaggacagtgctacctgacgtgagctgcagattcaataaaattcctatcagaatctcagtgacatttttgcagtaaaaaaaaatctgtcctaaaatttatattgcatctcatgactctaaatagacacacagctttgaagaggaagaatgaagctggaggactcacacttcctgatttcagcatttactacaaagccccagtaatcaatacactgtggtactggcataaaggaggacatagaaattaatgaaatataataacccagaaagaaatgcttgcatatatggccaaatgattttcatcgagtgtgccaagatcgttcaatggggaagggaccgttttctcaccaaatgatattgggaaaggtggatatccaagggcaagaacagtggaacctttacctaacaccatgtacaaaaagtaacccacaatagatcaaagatctaaatgtaagggcaaaaactattcaactcttagaagaaaagcttcatgatactggatttcacaatgatttcctggttgtaacaacaaaagcataggcaacaaataaaatggataaatcggacttcataaaaatcaaaaccttttatatatcaaagaacactatcaagaaagtaaaaagcaacccacgaaatgataaaaatatttgcaaattatatgtgtgataagaaattaatttccagaatacatgaaaagctacaagtcaacaacagcaaacatccaaaaacccaattaaaaaatgaacaaaggattaaaatggagttttctccaaggaagatatacaaatatcaaataagcccatgcaaagttcctcagcatcaggaatacttggagatatgcaaatcaaaaccacattgttacaccacctcacacactttaggatggttttgataaacaacaacaatgacagcaacacaaaacaacaggtgttttcaagtagatggaaaaattggagctctagtgcattgctgatgggaatgggaaatgttatagccactgtaagaagtggtgtggctctctctcaaaaaattaaacaataaattaccatttgatccagcaattccacttctggacataatccccatagaattgaaagaaatttgaacaaatatttgtaaactgatgttcagagaagcattactcacactagccaaaaaatggaaacaactgaaaagtccattgaaagataagtgggtaggcaaatgaggtgtatctatacattgaaatgttgttcaaccttaacaaggaataaaattccaatacatagtgcaaagtggatgaaccttgaagatattatgctaactgaaataagccagacacaaaaggataattattatataattccatttataaaagatagttagaatagccagttacatagagacagaaagtagaatggtgggtgctaaggtttagggggagaaggagtgagagttactgtttattggctacagaggtttaatatggtaagaggaaaaagttctggaaatggatagtgtgatggttacacaacactaaattgcacacttagaaatagttaatggtaagtcttatattagatatatataaagtgtccagtagtcttaccctctctataattacacactttttggcactgcccctttcctgccatgcagagccctaggggtgaatctccctatttctccagctctgcatcagtcactgtcctccgtgctgtgtcccaggtgctgtgcccacagcctcatacagccggtgacttcagagccaggacacagctcaggagtctgccctgaggctccctctctttttgtttccctgcagcctggcccgggggaggcttggcttcaactggcaactcgatttagccaaattcaggacaggccaccagggctctttctccacagatgctggtcccacccaggtggagtcaggcagggccagtcaccagaggagcctggagcagagcaggaagcagagtctgagctgctcctccctcacccaaggggcttcctcctctcatctgggggaaaagtgtcagcttgtttcaaagcctcggatgttccttgtagctcatagaataggtacaagaaaacaaagacgtggcagaaggggatgtgttggtgacagcaagaagcaacttgatcttgaggactctccttcttgtccctctctgaatcctcttctaccacatagggctcagggctgataaagcccgctccgtacctttctcaggccagacacaaggtcagccatgagaaaacagaaaaacaaggagaagagagtctgtagagacaaattgggagggttcaggaggagaatttgggatttgcttgtgcccatgggacacaggctgggaataaaaatgttttcctgactcttctctgaaagccagagagactccacctaaaactctattgccaagcatgctgggatccacttaccagagactttgactgtcatggatttggagctttccatgccagtggctgagttacgaacagagcaagcatagagcccgctatgctttgtagtaatctgggggataaagagcttttgtcctgatagctgaaacttcccattaattgtccaagaatattctgctggtgggttagagtccgcgaagcaggacaagtagaggttttctcctgaatggtaataggtgaatgaagggtaaattctggggaggtctggaccatctggagcaaagagaataaagccacaggtgatgtcatccgagggaaggggatgctcctggtctcttaaagggacacagtgaccctctgagccaagacacaccctcaagtgccagccaaaccccctctatgttcactgagctgaagcctgaggtattcccctgtttctcccatcacaagctgtgggccccaagtctcccatgacaagagcgtcccctccccttatattcttggttaaggctgtgcctacccagatcttcccagggcaggaagttatggccagctcggatgtccagaagtaatggtatctatacttggaccagagagagagtgagaggcctggcctctggtcgttttgatttaagctggtgtcctggcccacagaggaacaaaagatactcacagaggacattcagggtgactgggtaactgcggatgccaccatatcggtcctgtatttcacattgatagggtcctgtttcatttctcgtgacactgggtagaatgaggatcctgttttcaatgggtcgctttaccctgggactgaccgggaggctctgaccatttagccaccaaatgtaggtgtagttctcactcttaggttcacaggtgaaggctaagacatccttattctccctggggtttaagttgttgatggtgatgtagggcttgggcagcttcgctgtgtggataacagagagaagattgtcctgtgtggcacctttgattcctccactggcatccttcaatcagagttggcatctcccacctctcagcccacccgagtccttgaaagccaatagctggtgcgtgtgtcacaagacagatgcatgatgatctaagggctcaaagactgtgaggccagctgctctgtcttagggaagcacagactttctcaagtgtcaattgagcagcagtgttgggtcatggacagacacgtcaatgggagtcacagcccctggtacccctcccagtccctccataatcagttgactggctggctcaccctgggttccttacctggaatgtgcaactggtgggccccttccaaattccatcctactttgcccccatagatgtgatttctctgcaacttccatttccaaggacattctagagatgagtaataatgggacttcccatggccctgaaaccctgaagatactgagcagcctggcctgggactggatgtttcagcagaaataacacaggggagaccagaatcaagcctggaggtcagttcagtcatcaggcagtggaggctcaaggtggggcagttttttgcaggtgtttcatgatgacttacttgaaccagtgacctctaaagatagagcagagtgcaaggaatgatctagaaagagtgaaggtgacaggcaagagctggtggctttggagcagaagcatgttccctgtcttgggttctttaagtttcctctccttctgcagagggcaggtgaggaccatgtggatctttccagaaatacatgtggacatttgcaaatgcagcactgactggtggaaagggtgggaatgaactgctggaaatctggtcctcatggaccatatgtgtttgatggatatgagacaaatttggagagaagttttgcaaatattttctttcattggacattctactcaatgattccatgggttcgactactctagggacctcatgtaagtggattccagagtgaatatgagaagagactgctggttgccaggagctgggagtggggagaatcagaagttgttcatgggtgggcagtttcagttattcaaggtggggaggttctagagatctgctgtagagcttgatgcctatagttcacacagattgagtatttcttatgcataagacttaggacaaaaagtgttttggatttctgacattttttgattctgaaatatttgtcatatacttactggtttagcatcccaaatctgaaagactcaaaatctaaaatgcttcagtgagcatttcttttcagcatcagattagtaggcaaaagtgggaggtgataagccaaagatattcttgccctttttttttctctcaccacttttctagcttggtgattagttttcggtgaattccatactggccatgctgcacttgtatatttttgaaggccttgggatgtgagaaaggctgattgctattttctatgtcatcagaactttccaccttttcatggttgcctctttttctcagtgtatctgttgtggcagtcattaataagagcctgtcaggtgagatttaggacagtgttttctaattctgcaaaaaatgttactgggattctgttaggtgttacattgaatccgcaactcactttgggaatattatctttctaacaatattgattcctccaatccatgaaaatgaaatgtgtttccatatattgatatcgtctttaacttgtttcagcaatcttttgtagttttcagggtataatcatttgactttttggttaaacttatttcaaaatattttattccttttgatgttaatgtgaactgaaattctttccttaatttcctttcagattgttcattgttagtgtatagtctaaagaatgatctagaaagagtgaaggggacaggcaaaagctggtggttttggagcagaaacatattccctgtcctgggtttttgattttccctctccctttgcagagggcaggtggctcttccctgatagctagatagacttcactggaaaacatagtgccaatgctccagggatccacttaccagggactatgatcctcttgattatgagatttgttccagcagtggctgagttatggatgaaacagacatagacccctctatatgttttagtgatttgggggataaagaacacttgtgctgattgctggaacttcccatcaatcagccaagaatgctctgccagtgggtgagagtctgtgaggcaggagagcttgggggcttcccctgtatggtaataggtgtatgaggaggaaatggtgggggcatccaggccatgtggagcaaagagaataatgtcataggtggtattgtcagagggaagggaaaatcctggtctgtggaagggccacagtgaccctgtgagccaagttgcaacactgaagtcccagccaaatccctgctgtgttcactgatctggagcctgagacagtcacctgttttgcccatcacaagctgtggacgctgagtctcccatgacaggagcagcctcttttctcctattgttgatcaagcctaggcctactctggtttgcctggggcagaaagtcatggccaggtttgatgtccaggggtaaaggtctctgtacttggacctgagagggactgagaggcctggcctctggccacgtgtatttgggatggcagactggctcacagaggaacaggagatactcacggaggagattcagggtgactgggtcactgcggctggcactcactgggttccgtatttcacattcatagggtcctgcagtgtactttgtgacaccaaatagaaagagggtccttttgtttttggacaactgcaagctgtgagtcatagggaggctctgaccattcatccaccacaggtagcttgcgtccggagtctcaggatcacaggttaagctcacagcctccatgtcctccctggggtataagttgctgctggagatggagggcttgggagtctccactgtgcagaaaacagagagaagattgccctgtgtggcacctttgattcctccaaaggcatttttcaatcagagttggcatttcccacctctcagcccacccaagtccttaaaagcccatggcaggtgtgtgtgttacaagacagatgcatggcaatctgagggctcagagattgtgaggctgcctgcttcgtgtgggagaagcacagactttcttaactgtgaattgagcagcagcattgggtcacggaaagacacaggaccagcagtcacagcccctggtgcctctctgagtccctccatctcgaagtgcctgcctggcccaccttgtggtcctcacttggagcatgcagtgctggaatcttcttagtttcagtcttactttgccgcccgaggtatgttttctctgcagcttcccttgccaaggacatcctagagatgggtgatggaacttccaattgtctttaaaccctttggatactggaaagcctgacctgggactgggtacttcagcagaaataacacaggggagaacagagtcaagtccggagttcagttcagtcatcaggcagtggagccacaaggtggggcagttttcccaggtgtctcatagtggctgacttgagccagtgacctctaaagatagagcagagtccaaggaatgacctacaaagagtgaaggggacaggcaagagctgatagctttggaccaagaccacgttccctgttctgggtccatgatgctcccttccccctgtagagggcaggtgaggaccatgtggatctttttggaaatacatgtggatgtttgcaaatgcagaaccgactggtggaaagggcgaacatgaacagatgatggaagtctggccctcatggaccatatgtgtttggtggatattagaccaatatttgggaagaagccttgcagatactttctctcattagacattctactctctgattctgaatttgactactctatgtacctgatatcagtggattccagagtgaatcagagtgtagaatagtagtttccaggagctgggatcaggggaatagggcgttgttctgtgggtgtgcggtttcagttatgcaggatgaggaggttctagagatctcctgtacagcttcatgcctatagttcatacagataaagtgctccttattcagaaagcttaaaaccaagtgttttggatttctaattttttttattttggaatatttacagtacatgtactggtttagcatcccaaatctgaaaaatttaaaatccacaatgcgccagtgagcacttctttttagcatcacatcagtggtcagaagggttgagttttggagcatttcagattgtggatttctggatttccgatgctcaatttgtaatactgtaattttcccataaaaatttgtcaggagtttagaccttatgttctgactctagtaacaacaacagcaaaaaatttggaggaaacattgaaatgttttcataagtggaaatttttactgatgatccaaacatctaagatcaattgctggtagtagtatttctcttgagaccaaaataaggtttaggtgtgccgtgaattccagcaggatcacattatgctcaaagaaagatgccaaaggtgatttgaaattagcaactccttaagtagagagagtcccgttaaaaggacagaactggttagtgtgtcaattgcataaagggaggaaggatgccaaactaaaagaagtgatgtgtgttatgttagtaaatatagaaagaacctgcttctaatttctgtgcagagttaggaaaaatggggaggaccccaaaacaggtatgtgaaatgctttcttcattttctcttaagctcaggaaacaccactagtgtttaagtttgtgtgaattagaaagagtctaagtgagatgccaatggtttgtgtgtctccccacacgcagaactccaacttatgaaaacggcatcatcatgaggaaacagttgtatgtggcacaggcagtaaagccatcagatagcacccacctggccacctccacctggtccccaaaaccaccagtattcccattacgtgtatcttatagcctttgtagttgtcccacagctacaaaatttaaaaattgctattgtcaaatcaaaatattaaatatgaagttgaaatgttgttccactttttttccccactcttgttgaactttcctgtttcagttttggaagtttctattgacatatcctcaagctagggattctttcctcagctatgttcagtctaccagtaagtatcaaaagcattcttcatgtctctaaaaacatttttttttttctgagacagagtctcgctctgtcacctaggctggagtgcagtggcatgatctcatctcactgcaagctccacctcctgggttcatgccattctcctggcttggcctcccaaatagctgggactacaagcgcctgccaccacgtccagctaattttttgtatttttagtagagacggggtttcaccatgttagccaggatggtctccatctcctgaccttgtgcctgcctcggcctcccaaagtcctgggattataggcatgagccactgtgcccagccatctctgagggattttaatgagttgttgacttttgagtttgttcagctttttacttagtgttagaaccgaggaacaaatttcaagcttgttatatgcctgacaggaagccagaagtctctaggaagtgaccggagaatgtgagctttatagcaggttgaggatggagtcacaagtgaaatgggtgaaatgagcccatggggtttggggactgcaggcctgtccagcctctgacactctggtgagtcagtgctaagattacaacagtgacagcaaactagcatggctgagtccatctggtatctagtctcaggctggctgtcctcactcattcctgggcataggccaggctaaccttgggaggaatttagtttattgtttaactttgaagcaagaatgataattgttcctctgtaaaagtaacacccttactttgcccagggactgcctttgtaaaactagtgaaagaccatgagattaagattataggagggaactgaattctgctaaaatgttggcagagtttttataatccttgactgctcaaatgtcgttgggccagagtttacaaaatttgtaactaattgctcctatagataacatcactattgtagaacgtgagattggtcttttgagatgtttctcattcttttgcattctggcaaccggctgacctcatccatacctatgactaatggctcagcccgtcatgtggtccctacctagaggtggattcaagcacaaacagatcatttccctccgcccgcatgattccatcaccaatcagcagtactcattttttagtcctgtgcccctgaaactatccttgaaaatctctaagccctgatccactggggaggctgatttgagtaataataaacctccatcctcctgtttggcagacttggagtcattaaaatctttctttactacaaaccaccatttcaatacatttgtgtgtgtgtgtgtgtgtgtgtgtgtgtgtgtgtgtgtgtgtgtgtgcaggaggccagaagaacttgtctggcaattataagagtggatggagaaactgcctatccctgtcccatggtcttgtccacaggtcagcctcacaaagggaaagagccctggatgggaatacagtggaaactcattctcttagtgacctggggacattggctctagaggaagcctggcaggagtggcaactccaggtgatttctgcacctttcctatttcctgggaggtgggccaggccacagtgttagcgggaagggaactgaacagtcagcctagttagagggagtgtctggggaagacctaggggtgggggaagaagctgtgcaggacagggcttgccagtcagaatgaagtgggaggaagatgagggacacagagaagcagagagaggcagagacaccatggcagtgagcagtgagggctacactgacttcagagaccccagggaccaggtgcccccagttccacagtccaggaccaaggagccctgagaaccctccggtggccaaagagcttcagagttacatgaggtggggttgctttagggtcaagaggtagtggggggatgaaacgtgggtgtcagcctctgaaggacaagggacaggtgtggctagaacctcctaggattctgcatgcaaattcagtctctaaagaggttttggatcattcatttcttcattccatttcttcatttgttatgtaagagctcctgagtgtgtctgtctcgctgggcctatggtggtgtagggtgtgagtggggaaagaaaacaaggtcctctccttgatcctcttgtgacagtgacatggacactttgggaaacacaggatttcaggttcagtgatggtggttaagatctgagggggaggcctggacatgttttttccactgactctgacggttgaggtaggtgatttagttctggaatacagactaatcagttgaccgtttgctctcactcctctgaggtttggatgcctaagaagagaggatttgagccaataaatgactatagggtgattggaacccagtaagccctcacttctggtggaggagagggtgggcctttggctccagacacacctcatgtgaccctgatctcccctttgtgtttgtgtgactctggttcagtgactgtggcttcctgtgcctcagttttctctcaaacaaataagctaaatggcaaatggactgtggcttttcatgctatctgtgaataaatgttaaatgattcacagtcacgtgacctaattcttggcacagtggaggtttcacacaaacagcatttattattaatttgcttccatgagaaagcacctttatgtcagatgcctgtggacaagctgctacctggtatatcttctctcctctgtttctgcttctggggacattagactttctatggactggcctaagcctcctaaggcagttgtctgatggcctacaaagcttgtctttctgtcctctccactctgagtgtcaggtgaagaaagctctgtccttgcccagatgaggctctgagggctgagccctggctggtgaacagctccaggagacacagtcctctgacagctggtaaatccttggtcccagtaagccctgcccaagaagcgacaacccagccccagtacaggctcctcagatttatctggagcaaggatttagggacatggttctgggggtgaggcttctagggctgagcttctctgagagtatttcatggggcccctgaggccaagccctactcagtttgccagggtctttctcagggtcaaatttatgaagagagcatgaggtgcttggctgagactgatctcctcctgctgagtccccccatcagactgtccttcctctgcagcgagtgtctgcagggtctggatgcgggaaaggaattctgatctgttgaaatttgtctcttctgtgtgtgtcctgcactaaatgcccaaaccccagcatgggacataatgcagagagggacacaggcacaatccaggcctgacaatcctttgtgtgtgaagtaaagaccccatcccccaacacccagtgatcacgtggagtcactcacggtataaggtgaaggtgaaatgtccagtttctcctctagtcccatcacctcgctttacgatgtgtaaggtgtaggatcctgcgtcctcccgggtgacattctggatcagcagggatgcattggaatatactgtttctcgtccactgtatgcaggcccatatataattatttgaccatctactacgtatgatgtaatgtaatggtagaggtccttcatttgccctttgtaccagatgtagccagcaagattctggggcaaattgtggacaagtagaagaacgtccttccccttggaaactttggttggctcggcttcaatcgtgacttgggcagtggtaggcaagttccagaagtttaaaagtaatgctaggaggtggagagagcatcagtcaatattgagacctatgcattggggtgaaaagatgtggccctgggtcctgagaaggtctcttcaatcctcagctttgaagagacacacacacacacatacaaacacacacacacacacaaaaggggcatgtgtatatgtgtttgtgtcctactctcctactaggtgaaggtcagcaacatgacccccattccttcaacacttctgaccttggcatttttctgtttggaatcctcttccccaggggtccgcacggccccctccacactgccctcaggtcctgctcacatcagggcatccttagacttctttcctgacgcctccttcagagaccctgggtcttccctttctgacctttccctgctctgctccctccagggttcttctcaacacctgacctcacattctagaactctttgcatgtctgtcttcccccccatgacagcgtgagctccgtgaggacagggacttttgtgatcttctttgcaccccagtgcctggaacaggctgcagactcctgtagatgtgagagttctcagggccctccatgccctgggtgttttttcttcccccagttgttgaggtttttttgctgaggacagtgtttcatgccctgcttatatttttatttgaagtgtcatctgatatagttattattatcatttttcaaaatgtggtggcccctgatgattaatcaggaaaacagaacacttaagattttcctacctcttaccaattctggttcctgtgactttcctgttttgacccctgtccctcttgggtgtattttcccctatccaggctccaacagagacttctttcctttttttcttttttctttccattcttttttttttttgagacggagtcttgtactgtcgcccaggctggcgtgcagtggcactatctcggctcactgcaatttcttcctcccgggttcacgtgattctcctgcctcagcctcccgggtagctaggattactggagcacaccacaatatctggttaaatttttgtatttttagtagagacagggcttcactgtgttggccagactgatcttgaactcctgatctcgtgatccaccctcctcagcctccctaagtgctggcttcttttattttttagaaccccaggagtctctccaggagaccccatccagtcactctgcttcctcctcctgtcctctcccaggaagttctctcctcacctgtgagcaggagccccttccaggtgatgcgctgtgtgcagggaggggctgagaggggccccatggtctctgctgcctgcgtgttctcctctgtggagctgagcctaggatccagaaacttcctgagcatggctctcagctgtgctgtccttcctccttctgcgctgagcctcttcccggggcaggagcacttctcaggttcatgggcggggtcaggcccaggacacctctctgtcccctcctctctcagtcctgcctccttgtccctcctgtttttccttttgtctgtgtttcaggtccctgggaattgtggaggcctctgcctttttcagcagtgattctttcaccaagcctcatcacacactttgtgcagacacacacacacacagacacacacagaagagacacacacagacccacacagtcagaaacataccctgcaggttgggcaagcagagtcctgggcctcagcctcctgctgtccccatggctctgggtcggggtgcacattcatgccctttggcctctttcatccccatctggctctccccttcagtgcaggaggctggagctgaaccaggtccctgtcacagtgacaccccattgtgctgtgggtgagctgtgtgttgcctgatgagagggaaccttcctttttctaatcgtgtctagcttggctgcagcttccaaggatggacattcaggacctgggtgtcccagaggaaactgtccttcctggaggtgtgcaggatgaatctctcatgcctcttgtgaggagaggcctgtgctggttgctcagtggggggctgtgagtcccatagtcaaagggacagttctcggtcactctatggctccctggggtctggcggctgagctggagctcatggtttctcatgttcttcctgaccatctttgatgtcctctcttctctgcccagcttattgtcctgtggtcaccacaccttccccgtggtggtgcaggaggaagtggggagttacccaggaaccccgggggacatggctcattgagatgcaggagggggagcctgggacagagcaggggttcagagctggagagattcatcccaacttactctgtggccatgatgggctcagccatccatgtgccgacatacccaggggtctgtcctgaggtttttgacctggccaagctgctgtgtgtagaggaggaacaggtagtggccagagagcctgtctggagggacgttgctcacacctgagtgggcgtgtgggggtgagttgtgttctgggagcaaagagcaataacatcccccttctcccagcaagcacacaggagaggtctgtcttcccaagggacagctgggggtaggtggccacatcccggatggtgcctgtgtgtgagcatcacacgtgctctgagccccccggggtgcagggagcaggcaggacacagggtgcctggctgattcccggggaggctgtgggccctcaggcagccactgttctgtgtcagtgctaggcttggcctgggatgccccagagaacaggacagatggagcaggggcaggcatttagggagcagtgacagaacgagttgatgaggatggagggaggccacgaggggaaagcacccagtgtagtgtcgcgtgcaccagcactgccctgggagatgcctttagctgggcccagggaaggagcaggtgtgtggggaggagctccctgcagggggagtggtgttaggttggcggcccccaggtcagggaggagctgacagagtccgtgtggggagcatggagggcgctgaggacttgggccgaagtgaccctggtgagggtggaccctgctgggctgtgggttccgttgagggcggttggcatcccctgggaaggctccaggctgggagggactctgtccccctctggtggacagggagggaaatgtgaacggcagcaatcccaggccaggctgcatgttttattccacatggatctgcacacttcacacgaggtcacacatatgttatgttatagctccttcaccttccagccccgtgagtcccagtctgtgtggctctatgttcactgttctccctctttcacaatcagatgtcccaaatgcagatttttgtcaccttctgtgagtttgtgtttgtgtgcagtaggcagcactgtgtataccctgggggcagtgatgtctggggctgagcagtgcacatgggcttgggagaagaagagggagcagcagggtgggaagatcaatgtcaggggggcaaggacaagtcattttcattttctcactcccagggaccagaacccaggattctgactccagggcacagtaccacaccctgctggtgtccctggatgtcatgatgctcatagtgtcatgttgccttgtcattcatcttttatggtgtaagtttatttgcctcaaatcagaggcagggcttggtcaccaatgcagtttcaatactgtatctggttcaggtggctccagttggtgtgcagagataaaatcttagaggcatctctcctgcttggtgtgctgggtttccctctctccagctgctttctttaaactgataattctgacatttgccctcacatttaaagtgaccacctctcagtcacagcgtgagcccctggtcccagtgtttgctgcttgctttgaacacatccattaaagctccctgctggaaacctgtcagataacaccctggacttaataaagccattggcttaccggtctcttctctcctctctccatgggctcactgacctctgtgtctgtggtctccaggtgtgccaagtgctccccagtgtctgtaagtagtaaaaatacttacactttcacgttgtggttgtatcactgtggcctcacatgccatccagggtctgatattgaggctgccttatgggacctgtgctggttgagcccctgctggagctcttgttttggggcgtctggttctgctggggacaggagcttccagctaacttgattgaaaatctgatgcctttcattgaaacactgggtcagatgatgtattcatgggcttcagctgccataacagacaccttagcctgggtgaattaaataatagaaatctatttttcacagttctgtgaataatgtgctattttaaccactttaaaatgcataatcaagtgaaattaaccacttacacagtgttaaattaccatcaccagtatttttcctagaaaatttttatcattttaaactgaaactttgtatcttttaaacaataactccctgtatgttccaccttagaccttgatcttctctactctgtctctatgaatttgcctattcttgatgcttcatataaatggaattatacaattatgttattttgtttctgacatatttcacttagcataatgtttccaaagtccatgcatgttccagcgggtgtcagagcttccttcctctttatggcagattatcattctgttgtatgtgtcaccatatttgtttattcatgtgttgatgaacacttggattgttttcatattttatcttttgtgaataatgctgcaatgaacattcccatgcaagtacctgtttgagtccctggatttaattctttgggtatatacctaggaatagatgttgtttcaaatgagaattctatgattagcttttttttattattatactttaagttttagggtacatgtgcacaatgtgcaggtttgttacatatgtatgcatgtgccatgctgttgtgctgcacccattaactcgtcatttagcattaggtatatctcctaaagctatccctcccccctccccccaccacacaacagtccccagagtgtgatgttccccttcctgtgtccatgtgttctcattgttcaattcccacttgtgagtgagaatatgcggtgtttggttttttgttcttgcgatagtttatgagaatgatgatttccaatttcatccatgtccctacaaaggacatgaactcatcattttttatggctgcatagtattccatggtgtatatgtgccacattttcttaatccagtctatcattgtttgacattttggttggttccaagtctttgctattgtgaatagtgctgcaatatacatacgtgtgtatgtgtctttatagcagcgtgatttatagtcctttgggtatatacccagtaataggatggctgggtcaaatggtatttctagttccagaatcgccacattgacttccacaatggttgaactagtttacagtcccaccagcagtgtaaaagtcttcctatttctccacatcctctccagcacctgttgtttcctgcctttttaatgattgccattctaagtggtgtgagatggtatctcattgtggttttgatttgcatttctctgatggccagtgatggtgagcattttttcatgtgttttttggctgcataaatgtcttctgttgagaagtttctgttcatgtccttcacccactttttgatggggttgtttgtttttttcttgtaaatttgtttgagttcattgtagattttggatattaaccctttgtcagatgagtagatttcaaagatttctcccattttgtaggttgcctgttcactctgatggtagtttcttttgctgtgcagaagctctttagtttaattagatcccatttgtcaattttggcttttgttgccattgcttttggtgttttagacatgaagtccttgcgcatgcctatgtcctgaatggtaatgcctaggttttcttctagggtttttatggttttaggtctaacgtttaaggctttaatccatcttgaattaattttttagaaggtgtaaggaagggatccagtttcagctttctacatatggctagccagttttcccagcaccatttattaaatagggagtcctttccccattgcttgttttctcaagtttgtcaaagatcagatagttgtagatatgcagcagtatttctgagggctccgttctgttccattgatctatatttctgttttggtacctgtaccatgctgttttggttactgtagccttgtagtatagtttgaagtcaggtagcgtgatgcctgcagctttgttcttttggcttaagattgacttggcgatgtgggctctttcttggttctatatgaactttaaagtagatttttccaattttgtgaagaaagtcattggtagcttgatgggtatggcattgaatctgtaaattaccttgggtagtatggccattttcacaatattgattcttcctacccatgagcatggaatgttcttccatttctttgtatcctcttttatttcattgagcagtggtttgtagttcttgaagaggtccttcacatccctagtaagttggattcctaggtattttattctgtttgaagcaattgtgaatgggagttcactgatgatttggctctctgtttgtctgttgttggtgtataagaatgcttgtggtttttgtagattgattttgtatgctgagactttgctgaagttgcttatcagcttaaggagattttgggctgagacaatttggttttctagatatacaatcatgtcatctgcaaacagggacaatttgacttcctcttttcctaattgaataccctttattttcttctccggcctaattgccatggccagaacttccaacactatgttgaataggagtggtgagagagggcatccctgtcttgtgctagttttcaaagggaatgcttccagtttttgcccattcagtatgatattggctgtgggtttgtcatagatagctcttattattttgagatatgtcccatcaatacctaatttatggagagtttttagcatgaagcattgttgaattttgtcaaaggccttttctgcatctattgagataatcatgtggttcttgtctttggttctgtttatatgctggattacatttattgatttgcatatattgaaccagccttgtatcccagggatgaagcacacttgatcatggtggataagctttttgatgtgctgctggatttggtttgccagtattttattgaggatttttgcatcaatgttgatcaaggatattggtctaaaattctcttttttggttgtgtctctgcccggctttggtatcaggatgatgctggcctcatgaaatgagttagggaggattccctctttttctattgattggaatagttcagaaggaatggtaccagttcctgcttgtacgtgtggtaaaattcggctgtgaatccatctggtcctggactctttttgtttggtaagcgattgattattgccacaatttcagatcctgttattggtctattcagagattcaacttcttcctggttcagtcttcggagggtgtatgtgtcgaggaatttatccatttcttctagattttctagtttatttgcgtagatgtgcttgtagtattctctgatggtagtctttatttctatggaatcgctggtgataacccctttatcatttttttattacatctatttgattcttctctcttttcttctttattagtcttgctaggagtctatcaattttgttgatcctttcaaaaaaccagctcctggattcattaattttttgaagggttttttgtgtctctatttccttcagttctgctctgattttagttatttcttgccttctgctagcttttgaatgtgtttgctcttgcttttctagttcttttaattgtgaagttagggtgtcaattttggatctttcctgctttctcttgtgggcatttcgtgctataaatttccctctacacactgctttgaatgtgtcccagagattccggtatattgtgtctttgttctcgctggtttcaaggaacatctttatttctgccttcatttcattatgtacccagtagtcattcaggagcaggttgttcagtttccatgtagttgagcagtttaaagtgagtttcttaatcctgagttctagtttgattgcactgtggtctgagagatagtttgttataatttctgttcttttacatttgctgaggagagctttacttccaagtatgtggccaattttggaataggtgtggtgtggtgctgaaaaaaatgtatattctgttgatttgaggtagagagttctgtagatgtctattaggtccgcttggtgcggagctgagttcaattcctgggtatcctttttaactttctgcctcattgatctgtctaatgttgacagtggggtgttaaaacctcccattattattgtgtgggagtccaagtctccttgtaggtcactcaggacttgctttatgaatctgggcgctcctgtattcggtgcatatatgtttaggatagttagcccttcctgttgaattgatccctttaccattatgtaatggctgtctttgtctgttttcatctttgttggtttaaagtctgttttatcagagactaggattgcaacccctgccttttttgttttccatttgcttggtagatcttccgctatccttttattttgagcctatgtgtgtctctgcacgtgagatgggtttcctgaatatatcacagtgatgggtcttgactctttatccaatttgccagtccgtgtcttttaattggagcatttagtctatttacatttaaagttaatattgttatgtgtgaatttgatcctgtcattatgatgttagctggttcttttgctggttagttgatgcagtttcttcctagtctcgatggtctttacaatttggcatgatgttgcagtggctggtacaggttattcctttccatgtttagtgcttccttcaggaggtcttttagggcaggcctggtggtgacaaaatctctcagcatttgcttgtctgtaaagtattttatttctccttcacttatgaagcttagttgggctggatatgaaattctgggttgaaaattcttctctttaagaaagttgaatattggcccccactctcttctggcttgtagagtttctgccgagagatccgctgttagtctgatgggcttccctttgtgggtaacccaagctttctctctggctgcccttaagattttttccttcatttcaactttggtgaatctgacaattatgtgtcttggagttgctcttctcgaggagtatctttgtggcgttctctgtatttcctgaatctgaatgttggcctgccttgctagattggggaagttctcctggataatatcctgcagagtgttttccaacttggttccattctccccgtcactttcaggtacaccaatcagacgtagatttggtcttttcacatagtcccatatttcttggaggctttgctcatttctttttattcttttttctctaaacttcccttctcacttcatttcattcatttcatcttccatcactgataccctttcttccagttgatcgcatcggctcctgaggcttctgcattcttcacatagttcttgagccttggttttcagctccatcagctcctttaagcacttctctgtattggttattctagttatatcttcgtctaaatttttttcaaagttttcaacttctttgcctttggtttgaatttcctcctgtagcttggagtagtttgaacgtctgaagccttcttctctcaactcatcaaagtaattctccatccagctttgttccattgctggtgaggaactgcgttcctttggaggaggagaggcactctgctttttagagttccatttttctgttctgttttttccccatctttgaggttttatctagttttggtaattggtgatggtgatgtacagatgggtttttggtgtggatgtgctttctatttgttagttctccttctaagagacaggaccctcagctgcaggtctgttggagtttgctagaggtccactccagaccgtgtttgtctgggtaccagcagctgtgtctgcagaacagcggattttcgtgaaccacaagtgctgctgtttgatcgttcctctggaagttttgtctcagaggagtacccggccgtgtgaggtgtcagtctgcccctagtggggggtgcctcccagttaggctgctcgggagtcaggggtcagggacacacttgaggaggcagtctgaccgttttcagatctccagctgcatgctgggagaaccactgctctcttcaaagctgtcagacagggacatttaagtctgcagaggttactgctgtctttttgtttgtctgtgccctgcccccagaggtggagcctacagaggcaggcaggcctccttgagctgtggtgggttccacccagttcgagattcccggctgctttgtttacctaagcaagcctgggcaatggtgggcgctcctcccccagctgcgctgctgccttgcagtttgatctcagactgctgtgctggcaatcagtgagactccatgggcataaggccctctgagccatgtgcgggatataatctcctggtgtgctatttttccagcccatcggaaaagcgcagtattagagtgggaatgacccaattttccaggtgctgtctgtcacgctgggagctgtagactggagctgttcctattcggccatcttggctccaggaccctataattagctttttgaggaacagcaaaactgtttctcctagtggctgtacctttttatattctcaccagcaatgtatgaggattccaaattctacataatgctgccacttgttattttacaatttaaaagaatggtagccagttttgtaggtgtgatgtggtgtctcattgcagctttgactttgtattttcctaatgactaatgatgttgagtatcttttcatgtccttcttgactatttgtatatcttctttgaagaaatgtctatttgagtcttttgtccatttataaattggatggtttctcactttgttattgagttgtagctagttcttgatattatctggacatgaaaactgcctatatgtggtttgcaaatattttctctcattccttgtctattaattattttcttgatattttcctttgatgcacaaaatgctcacatctttataaagcccaatttatcttttttttgtttcttatgcttttgtgtcatatctaagaatccattgcacatttgaggtcattaatatttacctctatgtctattttaagatgtttttatggttataggtcttatatttaactcactgatcaattttttagagaattgtttgatatggtgggaggtagagttatctaaattcactgttttgcatgtggttatctagttgtttctgcactatcattagaaaggagaattgttcctccattaaattgtcttgacaccctcttcaaagagtaattgaccataagtgtgagggtttatttctaggctctcaattctatcccatttgtctttatgtccattcttttgccagcagcttatgtctattctttggcagcaacttctgttttaataattgtactgctttgtgagatttcaaataagaaaattcaagtcctacaatttattttggcaagattgttttggctattcaggggtccttttttgaaaggtggggaggccaatgtttcacaattgggaaagccatttctgtcttcttcatggggaaatttgggagaatcttttaagaaacttaatctaagtaggtaaactgtcaccactttatttgctgaagtgctgtgttaaagtgtgcattgactcttgtggaagaattgtgactctggaagcacttgcccacatggtgagagacagtgaattccatgatgaggggcagagatgatgttgttttgggatacaatgttgttgggggagttgtatacatctctacttctttatgtctctgtacagtgggtgtagggaccagccacacagggtcggtgggtttttctctccatatgcagagatgagagattgtagaaataaagacacaagacgaagggataaaagaaaagacagctgggcccgggggactactaccaccaagacgcagagaccagtagtggcaccgaatgccaggctgcactgatttttattggatacaagataaagtgtcaggataaggagtgtgagccatctccaatgataggtaaggccacaggggtcacatgtccactggacagggggcccttccctgcctgtcagctgaggcagagagagagaggagaaagagagagagagcttacagcattatttctgcttattagagacttttagtactttcactaatttgctactgctaactaaacagcagagccaggtgaacagtatggaacatgaaggcagactaggagtgtgaccactgaagcacagcatcatagggagacggtcaggcctccagataactgcgggtggacctgactaatgtcaggccctccacaagaggtggaggagtagagtcctctctaaactcccacggggaaagggagactctaagtagctttcccagtctgctaagtagctggtgtttttccttgacactgaggctactgctagaccagggcccgcttggcaatgggcatcttcccagacgctgtcgttaccgctagaccaagaagccctctagttgccctgtctgggcataacagaaggctcgccctcttgtcttctggtcacttctcactatgtctcctcagctcctatctctgtatggcctggcttttcctaggttatgattatagaaatgaggattattttaatactggaataaagagtaattgctaccaagtagtgattaataatattcatatataatcgtatctaagatctatatctggtataactattcttcttttatatcttattatactggaacagctcatgccctcggtctcttgcctcggcacctgggtgacttgctgcccacaagtgggcatctccattggacacagtaggttttgaaatccttgtttatcctctggggtctgggtcttggcttacctgttagctgcagctgaaagaggtgtctgctaaggcaatgccacctgtggtgagaagaagggttcagcagagtgaaagcagctggggctcagagaaaccaggaaagtctgactcttagaaactgtgggtcagcagatgggtgtcctcaggggtaaatggaccatgccagtagccactgcagtggactggaagaaggtaagggatgccagttatcgcatgttctctctcagctctgcagctgaagatttgggccctgggttggtaaggccctgcagcaggggaagggtatacaggaatagctgcatatcaggaccaagtccatgtcatcttcttaggcattgttactgcagatggaggattcttttcagagacctggcctggacacatgggagggcccaccccattcttttgaaattattttaagagaacagtattagcaaatgtggtacatgttttattctgctagaatcagtattactgtcacattttacaatgtatctcttaggaaatggcgagagccatccacagaatgtgcatttaaaggggactctattataatttcagctttcctacctcttcatagaaaccatcttatctgcaaacacacgggcaatatctctgtgttcatttctattgggagtcctgtatgcaaggtggagagagccacatttccccctgagatgttatgtaaaagtttgggttgagatgacatatctgacactctattgttaccctcagaagctactacatgtgaaattctaatgactgcattatcctgccaagtgaaagaggcaggcatgagcaaggacagttaagaggggtgagagcctcatcatgatggggagtcttgttctgacatcttgggaaaaactgtccacagtgtgaagtcatccacttgttgtcctggtttacagtttgagcatctgttgttatggtgtcgaacattttagtgagttctgagtggctcacccttcaggtacaagggttttcccatgaaatttacattgagttgtccacctccagcttatagggcttctggaacagagtgggtctttttcttagcgattccatggaagaaaatggaattggaggaactagtagaattcagggtaatgtccagtctacaggtggataataaaaacacagaaacaatgaacagagatgcaatctcataacaggtgtactacagtttttattttccacataatttttctctctatgggcatctctagttttaccaatgataatttcagtagaataagtttgtttgcaaaataggttgagtttcttcaaacgtggtctgattgtttacataagtgcagcaagagtagcaatggaccgtgtaggctctcttttaaaattttcttttctctaagtttttataaggaatctgagattaaacttttacaaaactcttgagaataggaagccaaaccaaggctgacttcagactttgcctgcagttcatactggttcattctatctatatccttaaatataacatcccagtcaaagccttggtaatataaccaatgatttgaaatgtgtcctgttacaaagagagcagattgttgctgtacttgtgcaaatatgtgtattaccataaacatatcaattctcatgaatagttgcccaattctggggcagtcaggtagaaagcaaaagtaaatatttcaattacagttcaataaactgcggtatagtttattgaactgctataagctacagataggttaaaagagaaaaattccgtcaatgtagaaaacaaaccatttaaagaatcagcaaattttcaaatgaaaatcataaaaacattatcctcattattatcaattatttcattgaaatcaatgtttttcctgcttggtctaggctgggaattttatgaagatatcagcctgtttgttaaagttttcaaagttcttagacaaatttggagggtttaggaggagaatttgggatttgcttgtgcccatgggacgcaggctgggaataaaaatgttttcctgactcttccctgaaggccagatagactccacctaaatccctattgccaaggatactgggatccgcttaccagagacttttactgtcatggatttggagctttccttgccagtggctgagttacgaacagagcaagcatagagcccgctatgctttgtagtaatttgggggataaagagcttttgtcctgatagctgaaacttcccattaattgtccaagaatactgtgccggtgggttagagtccgcagaacaggacaagtagaggacttctcctgaacggtaataggtgaatgaagggtaaattctggggaggtctggaccatctggagcaaagagaataaagccacaggtgatgtcatctgagggaaggggatgttcctggtctcttaaagggacacagtgaccctctgagccaagacacaccctcaagtcccagcccaaccccctctatgttcactgagccgaatcctcaggtattcacctgtttctcccatcacaagctgtgggccccaagtctcccatgacaagagcgtccactccccttatactcttggttaaggctgtgcctacccaggttttcccagggcagggagtcatggccagctcggatgtccagaagtgaaggtgtctatacttggaccagagagagagtgagaggcctggcctctggtcgttttgatttaagctggtgtcctggcccacagaggaacaaaagatactcacagaggacattcagggtgactgggtaactgcggatgccaccatattggtcccttatttcacattgatagggtcctgtttcatttctcgtgacactgggtagaatgaggatcctgttttcaatgggtcgctttaccctgggactgaccgggaggctctgaccatttagccaccaaatgtaggtgtagttctcactcttaggttcacaggtgaagtttaagacatccttattctccctgggttttaagttgttgatggtgatgtagggcttgggcagcttcgctgtgtggataacagagagaagattgtcctgtgtggcacctttgattcctccacaggcatccttcaatcagagttggcatctcccacttctcagcccacccgagtccttgaaagccaatagctggtgcgtgtgtcacaagacagatgcatgatgatctaagggctcaaagactatgaggccagctgctctgtcttagggaagcacagactttctcaagtgtcaattgagcagcagtgttgggtcatggacagacacgtcagtggaagtcacagcccctggtatccctcccagtccctccctaatcagttgactggctggctcaccctgggttccttacctggaatgtgcaactggtgggccccttccaaattccatcctacattgtccccctagatgtgatttctctgcagcttccatttccaaggacattctagagatgagtaatgatgggactacccatggtcctgaaaccctgaagatactgagcagcctggcctgggactggatgtttcagcagaaataacacaggggagaccagaatcaagcctggaggtcagttcagtcatcaggcagtggaggctcaaggtggggcagttttttgcaggtgtttcatgatgacttacttgaaccagtgacctctaaagatagagcagagtgcaaggaatgatctagaaagagtgaaggcgacaggcaagagctggtggctttggagcagaactatgttgcctgtcctgcgttcaagtttcctctccttctgcagagggcaggtgaggaccatgtggatctttccagaaatatatgtggacatttgcaaatgcagcactgactggtagaaagggtgggaaggatctgctggaaatctggtcctcatggaccatgtgtgtttgatggatatgagacaaatttgaagagaagttttgggaatattttctttcactggacattctactctctgattccctggattcgactactctagggacctcatgtaagtggattccagagtgaatatgagaagagactgctggttgccaggagctgggagtggggagaatcagaagttgttcatgggtgtgcagtttcatttatgcaaggtggggaggttctagagatctgctgtagagcttgatgcctatagttcacacaaattgagtatttcttatgcataagacttaggacaaaaagtgttttggatttctgacattttttgattctgaaatatttgtcatatacttactggtttagcatcccaaatctgaaagattcaaaatctaaaatgctccagtgagcatttcttttcagcatcagattagtaggcaaaagtgggaggtgataagccaaagatattcttgccctttttttttctctcaccacttttctagcttggtgattagttttcggtgaattccatactggccatgcctcactcgtatatttttgaaggctttgggatgtgaagcctttgaaggctgattgctattttctatgtcatcagaactttccaccttttcatggttgcctctttttctcagtgtatctgttgtggcagtcattaataagagcctgtcaggtgagatttaggacagtgttttctaattctgcaaaaaatgttactgggattctgttaggtgttacattgaatccgcaactcactttgggaatattatctttctaacaatattgattcctccaatccatgaaaatgaaatgtgtttccatatattgatatcgtctttaacttgtttcagcaatcttttgtagttttcagggtataatcatttgactttttggttaaacttattccaaaatattttattccttttgatgttaatgtgaactgaaattctttccttaatttcctttcggattgttcattgttagtgtatagtctaaagaatgatctagaaagagtgaaggggacaggcaaaagctggtggttttggagcagaaacatattccctgtcctgggtttttgattttccctctccctttgcagagggcaggtggctcttccctgataactagatagacttcactggaaaacatagtgccaatgctccagggatccacttaccagggactatgatcctcttgattatgagatttgttccagcagtggctgagttatggatgaaacagacatagacccctctatatgttttagtgatttgggggataaagaacacttgtgctgattgctggaacttcccatcaatcagccaagaatgctctgccagtgggtgagagtctgtgaggcaggagagcttggggacttcccctgtatggtaataggtgtatgaggaggaaatggtgggggcatccaggccatgtggagcaaagagaataatgtcacaggcgatattttcagagggaagggaaaatctcgtctgtggaagcaccacaatcacagtgaccctgtgagccaagtcacaacattgaagtcccagccaaatcccagctgtgttcactgatctggagcctgagacattcacctgtttctcccatcacaagctgtggacgctgagtctcccatgacaggagcagcctcttttctcctattgttgatcaagcctaggcctactctggtttgcctggggcagaaagtcatggccaggtttgatgtccaggggtaaaggtctctgtacttggacctgagagggactgagaggcctggtctctggccacgtgtatttgggatggcagcctggctcacagaggaacagaaaatactcacggaggagattcagggtgaatgggtcactgcggctggcactcactgggttccgtatttcacattcatagggtcctgcagtgtactttgtgacacccaatagaaagagggtcctgttggtttcagacaactgcaacctgtgagacatagggaggctctgaccattcatccaccacaggtagcttgcgtccggagtctcaggatcacaggttaagctcacagcctccatggcctccctggggtttaatttgctgctggagatggagggcttgggagtctccactgtgcagaaaacagagagaagattgccctgtgtggcacctttgattcctccaaaggcatttttcaatcagagttggcatttcccacctctcagcccacccaagtccttaaaagcccatggcaggtgtgtgtgttgcaagacagatgcagggcaatctgagggctcagaggttgtgaggctgcctgcttcatgtagaaacacagactttctcaagtgtgaattgagcagcagcattgggtcatggaaagacacaggaccagcagtcacagcccctgttgcctctctgagtccctccgtctccaactgcctgcctggcccaccttgtggtcctcacttggagcatgcagtgctggaatcttcttagtttcagtcttactttgccgcccaaggtatgttttctctgcagcttcccttgccaaggacatcctagagatgggtgatggaacttccaattgtctttaaaccctttgggtactggaaagcctggcctgggactgggtacttcagcagaaataacacaggggagaacagagtcaagtccggaggtcagttcagtcatcaggcagtggagccacaaggtggcgcagttttcccaggtgtctcatagtggctgacttgagccagtgacctctaaagatagagcagagtccaaggaatgacctacagagagtgaaggggacaggcaagaactgatagctttggaccaagaccacgttccctgttctggatccatgatgctcccttccccctgtagagggcaggtgaggaccatgtggatctttttggaaatacatgtggatgtttgcaaatgcagaaccgactggtggaaagggcgaacatgaacagatgatggaagtctggccctcatggaccatatgtgtttggtggatattagaccaatatttgggaagaagccttgcagatactttctctcattagacattctactctctgattctgaatttgactactctatgtacctgatatcagtggattccagagtgaatcagagagtagaataggagtttctacgagctgggatcagggcaatagggcgttgttccatggttgtgcagtttcagttatgcaggatgaggaggttctagagatctcctgtacagcctcatgtctatagttcatacagataaagtgctccttatgcagaaggcttaaaacaaagtgttttggatttctaatttttttttgttttggaatatttgcagtacatgtactggtttagcatcccaaatctgaaaaatttaaaatgcacaatgcgccagtgagcacttctttttagcatcacatcagtggtcagaagtgttgagttttggagcatttcagattgtggatttctggatttgggatgctcaatttgtaatactgtaattttcccataaaaagttgtcaggagtttagacctcatgttatgttctgactctagtaacaaaaaatatttggaggaaacattaaaatgttttcatgagtggaaatttttactgatggtccaaacatctaagatcaattgctggtagtagtatttctcttgagaccaacataaggtttaggtgtgccatgaattccagcaggatcacattatgctcaaagaaagatgccaatggtgatttgaaattagcaactccttaagtagagagagtcccgttaaaaggaccgaactgggtagtgtgtcaattacataaagggaggaatgatgccaaattaaaagaagtgatgtgtgttatgttagtaaatatagaaagaactccctgcttctaaattctgtgcagagttaggaaaaatggggaggaccccaaaacaggtatgtgaaatgctttcttcattttctcttaagctcaggaaacaccactagagtttaagtttgtgtgaattaggaagagtctaagtgagatggcaatggctcatgtgtctccccacacgcagaactccaacttatgaaaatggcatcaacatgaggaaacagttgtatgtggcaaaggcagtaaaaccatcagatagcacccacctggccacctccaactggtccccaaaaccaccagtattcccattacatgtatgttacagcctttgtagttgtcccacagctacaaaatttaaaaattgctattgtcaaaacaaaatattaaatatgaagttgaaatgttgttccacttttttaccccactctttttgaactttcctgtttcagttttggaagtttctattgacgtatcctcaagctagggattctttcctcagctgtgtgcagtctaccagtaagcatcaaaagcattcttcatttctctaacagcattttttttttctgagacagagtctcactctgtcaccctggctggagtgcagtggcatgatctcatctcactgcaagctctgcctcctaggttcacgccattctcctgcctcagcctcccaagtagctgggactacaggggcccgccaccatggctggctaattttttgtatttttagtagagacgaggtttcaccatgttagccaggatggtctctatctcctgaccttgtgcccgcctcggcctccgaaagtgctggtattgtaggtgtgagccactgtgcccagccatctctgagggagtttaacgagttgttgacttttgagtttgttcagctttttacttagtgttagaaccgaatgacaaatttcaagcttgttatatgcctgacaggaagccagaagtctctaggaagtgaccagagaatgtgagctccatagcaggttgaggatggagtcatgggcgaaatgagcccatgggctttggggactgcaggcctgtccagcctctgacaccctggtgagtccgtgcaaagattacaacagtgacaggaaactagcatgcctgactccatctggcatctagtctcaggctggctgtcctcactcattgctgggcataggccaggctaaccttgggaggaatttagtttatggtttaaatttgaagcaagaatgataatagttcctccataaaactaacacccttactttgcccagggactgcctttgtaaaactagtgaaagaccatgagattaaggttataggagggaactgaattctgctaaaatgttggcacagtttctataatccctgactgctccgatgtcatttggcaagagtttacaaaagttgtaactaattgctcctatagataacatcactattgtagaacgtgagattggtcttttgagatgtttctcattcttttgcattctggcaaccggctgacctcatccatacctatgactaatggctcagccagtcatgtggtccctacctagagtcagatttaagggcaaacagatcatttccctccgcccacatgattccatcaccaaacaatcagcagtacttattttttagtcctgtgctcctgaaactacccttgaatatctctaacccctgatccactggggaggctgatttgagtaataataaacctctgtcctcctgtttggcagacttggagtcgttaaaatctttcttgactagaaaccaacatttcaataattttttttttttttttttttttttttttttttgtgcaggaggccagaagaacttgcctggcaattatgagtggatggaggaactgcctatccctgtcccattgtcttgtccacaggtcagcctcacaaagggaaagagccctggatgggaatacagtggaagctcattctcttagtgacctggggacattggctcgagatgaagcctggcaggagtggcaactccaggtgatttctgcacctttcctatttcctgggaggtgggccaggccacagtgttagtgggaagggaacagaacagccagcctagtcagagggagtgtctggggaaggcctaggggtgggggaagaagctgtgcaggacagggcttgccagtcagaatgaagtgggaggaagatgagggacacagagaagcagagagaggcagagacaccatggcagtgagcagtgagggagacactgacttcaaaaaccccagggaccaggtgcccccagctccacagtccaggaccaaagagccctgagaaccctccagtggccaaagagcttcagaattacatgagctggggtggctttaggggcaagaggtagtggggggatgaaacatgggtgtcagcctctgaaggacaagggacaggtgtggctagaaactcctaggattctgcatgcaaattcagtctctaaagaggttttggatcattcatttcattccattccttcatttgttatgtgagagctcctgagtgtgtgtctgtctcgctgggcctgtgctggtgtagggtgtgagtggggaaagaaaaggtcctctccttgatcctctcatgacagtgacatggacactttgggaaacacaggatttcaggttcagtgatgggggctaagatctgagggggaggcctggacatgttttttccactgactctgatggttgaggcaggtgatttagttctggagtacagactaatcagttgaccattttctctcactcctctgaggtttggatgcctaagaagagaggttttgagccaataaatgactatggggtgcttggaagccagtgagccctcacttctggtggaggagaggatgagcctgtggctgcggacacacctcatgtgaccctgatctcccctttgtgattgtgtgactctggctcagggactgtgtcttcctgtacctcagttttctgtcaatcagataagctaaatggcaaatggacagtggcttttcatgctatctgtgaataaatgttaaatgattcacagtcacctgacctaatgcttggcacagtggaggtttcacacaaatagcatttattattaatttgcttccatgagaaagcccctttgcgtcagatccctgtgggcaagctgctaccaggtacatcttctctcttgtgtttctgcttctggggacattagactttctatggactggcctaagcctcctaaggcagttgtctgatggcctacaaagcttgtctttctgtcctctccactctgagtgtcaggtgaagaaaactctgtccttgcccagatgaggctctgagggctgagccctggctggtgaacagctccaggagacacagtcctctgacagctggtaaatcctcggtcccagtaagccctgcccaagaagccacaacccagccccagcacaggctcctcagatttatctggagcaaggatttagggacactgttctgggggtgaggcttctagggctgagcttctctgagagtatctcaggggctcctcaggccaagccctactcagttctccagggtctttctcagggtcaaatttatgaagagggcatgaggtgcttgtctgagactgatctcctcctgctgagtccccccatcagactgtccttcctctgcagcgagtgtctgcagggtctggatgcgggaaaggaattctgatctgttgaaatttgtctcctctgtgtgtgtcctgcactaaatgcccaaaccccagcatgggacataatgcagagagggacacaggcaatgtccaggcctgacaatcctgtgtgtgtgaagtagaagtgacccctgtcccccaacacccagggatcatgtggaatcactcacgatataaggtgaaggtgaaatgtccagttactcctctattctcatcacctcccattatgatgtgtaaggtgtaggatcctgcgtcttcctgggtgacattctggatcagcagggatgcattggaatatattgtttctcgtccactgtatgcaggcccatatataattatttgaccgtctactacatatgatgtaatgtaatggtagaggtccctgatttgccctttgtaccagatgtagccagtaagattctggggcaaattgtggacaagtagaagaacatccttcccctcagaaactttggttggctgggcttcaatcgtgacttgggcagtcgtgggtgggttccagaagtttaaaagtgatgctaggaggtggagagagcatcagtcaatattgagagctatgtattggtgtgaaaacatggggccctgggtcctgagaagttctcttcagtcctcagccttgaagacacagacacacacacatacaaacacacgcacacacacacacaaaagcggcatgtgtgtctgtgtgtgtgtatgtgtgtgtgtcctactatcctactaggtcaaggtcagccccatgacccccattccttcaacacttctgaccttggcatttttctgtttgcaatcctcttccccaggggtccgcatggccccctccacactgccctcaggtcctgctcacatcagggcatccttagatttctttcctgacacctccttcagataccctgggtcttccctttctgacctttccctgctctgctccctccagggttcttctcaacacctgaccttacattctagatctctttgcatgtctgtcttcccctccatgacagcgtgagctccatgaggacagggatttttgtgatcttggttgcaccccagtgcccagaacaggctgcagactcctgtagatgtgagagttctcagggccctccacgcccttggtgtttttttttccccccaattgttgaggtttcttgctgaggacagtgtttcatgccctgtgtatatttttatgtgaagtgtcatctgatacagttattattatcatatttcaaaatgtggtggcccctgatgattaatcaggaaaacagaacacaagattttcctacctcttaccaattctggttcctgtgactttcctgttttgacccctgtccctctctggtgtatttccccctatccaggctccaatagagccttctttcctttttctcttttttctctttttttttttttgagatggagtctcatactgtctcccaggctggcgtgcgatggcactatctcagctagctgcaacttctgcctcctgggttcacgtgattcttctgcctcagcctcccgagtagctaggattagaggagcacaccacaatatctggttaaatttttgtatttttagtagagacagggcttcactgtgttggccagactgatcttgaactcctgatctcatgatccacctgcctcagcctcccaaagtgctggcttctttcattttttagtaccccatactctcaaggagaccccatccagtcactctgcttcctcctcctgtcctctcccaggaggttctctcctcacctgtgagcaggagccccttccaggtgatgcgctgtgtgcagggaggggctgagaggagccccatggtctctgctgtctgtgtgttctcctctgtggagatgagcctaggatccagaagcttcctgagcacagctctcagcagtgctgtcctgcctccttctgcgctgagcttcttcccggggcaggagcacctctcaggttcatgggcggggtcaggcccaggacacctctctgtcccctcctctctcagtcctgcctccttgtccctcctgtttttccttttgtctgtgtttcaggtccctgggaattgtggaggcctctgcctttttcagcagtgattctttcaccaaacctcaacacacactttgtgcagacacacacacacacacacacacacacacacacacacacacacacacacacacacacagaaggacacacacagacctacacagtcagaaacataccctgcaggttgggcaagcagagtcctgggcctcagcctcctgctgtccccatggctctgggtcggggtgcacattcatgccctttggcctctttcatccccatctggctctccccttcagtgcaggaggctggagctgcaccaggtccctgtcacagtgacaccccattgtgctgtgggtgagctgtgtgttgcctggtgagagggacccttcctttctctaatcgtgtctagcttggctgcagcttccaaggatggacactcaggacctgggtgtcccagaggaaactgtccttcctggaggtgtgcagggtgaatctctcatgtctcttgggaggagaggcctgtgctggttgctcagtgggggctgtgagtcccatagtcaaagggacagttctcggtcactctgtgactccgtggggtctggccactgagctggagctcagggtttctcatgttcttcctgaccatctttgatgtcctctcttctctgcccagctgattgtcctgtggtcaccacaccttccccgtggtggtgcaggaggaagtggggagtcacccaggaaccccaagggagatggctcgttgagacgcaagagggtgtgcctgggacagagcaggggttcagagctggagagattcatcttgacttactccgtggccatgatgggctcagccctccatgtgccgacatacccaggggtctgtcctgagggttttgacctggccaagctgctgtgtgtagaggaggaacaggcagtggccagagagcctgtctggagggaccttgctcacacctgagggggcgtgtgggggtgagttgtgttctgggagcaaagagcaataacatcccgcttctccctgcaagcgcacaggagaggtctgccttcccaagggacagctggggcaggtggccacatcccggatggtgcctgtgtgtgaccatcacacgcactctgagcaccccgtggtgcagcgggcaggcaggtcatagggtgcctggctgattcccggggaggctgtgggcccttaggcagctgctgttctgtgtcagtgctaggcttggcctgggatgccccagagaacaggatagatggggcaggggcgggcatttagggagcagtgacagaaagagttgatgaggatggagggaggccacgaggggaaagcgcctagtgtggcgtcgcgtgcaccagcgctgccctgggagatgcctttagctgggcccagggaaggagcaggtgtgtggggaggagctccctgcagagggagtggtgttaggttggcggccaccaggtcagggtggagctggcagagtccgtgtggggagcatggagggcgctgaggacttgggccgaagtgaccctggtgagggtggaccctgctgggctgtgggttccgctgagtgaggttggcatcccctgggaaggctccaggctgggagggactctgtccccctctggtggacagggagggaagtgtgaacggcagcaatcccaggccaggctgcatgttttattccacatggatctgcacacttcacacgaggtcacacatatgttatgttacagctccttcaccttccagccccgtgagtcccagtctgtgtggctctatgttcactgttctccctctttcacaatcagatgtcccaaacgcagatttttgtcaccttctgtgagtttgtgtttgtgtgcagtaggcggcactgtgtataccctgggggcagtgatgtctggggctgagcactgcaattgggcttggaagcagaagagggagcagcagggtgggaagatcaatgtcagggggcagggacaagtcattttcattttcttactcccagggaccagaaccctggattctgactccagggcacagtaccacaccctgctggtgtccctggatgtcatgatgctcatagtgtcatgttgtcttggcattcatttttataaggtgtaagtttatttgcctcaaatcagaggcagggcttggtcaccatggcagttttcaatactgtgtctggttcaagtggctccagttggtgtccagagataaaatcttagaggcatctctgctgcttggtgtgctgggtttccctctctccagctgctttctttaaactgataattctgacatttgccctcacatttaaagtgaccacctctcagtcacagcgtgagctcctggtcccagtgtttgctgcttgctttgaacacatccattaaagctccctgctggaaacctgtcagataacaccctggacttaataaagccattggctcaccggtctcttctctcctccctgtctgggctcactgacctctgtgtctgtggtctccaggtttgccgagtgcttcctagtgtctgtaagtagtaaaaatacttacattttcacgttgtggttgtattattgtagcctcacatgccatccagggcctgacattgaggctgccttatgggacctgtgctggttgagcccctgctggagctcttgttttggggcgtctggttctcctggggacaggagcttccagctaacttgattgaaaatctgatgcctttcattgaaacactgggtcagatgatgtattcatgggcttcggctgccataacaaacaccttagcctgggtgaattaaataatagaaatctatttttcacagttctgtgaataatgtgctattgtaaccactttaaaatgctgaatcaaatgaaattaaccacatacacagtgttaaattaccatcaccactatttttcctagaaaatttttatcattttaaactgaaactttgtatcttttaaacaataactccctgtatgttccaccctagaccttgatcttctctactctgtctctatgaatttgcctgttcttgatgtttcatataaatggaattatacaattatgttattttgtttctgacatatttcacttagcataatgtttccaaagtccatgcatgttccagcgggtgtcagagcttcattcctctgtatggcagattaacattctgttgtatgtgtcaccatatttatttatttatgtgttgatgagcacttgaattattttcatttttttcttttttctttttctgtttaatagtgttttttttatcattattattcttatactttaagttttagagtacatgtgcacaatgtgcaggttagttacatatgtatacatgtgccatgctggtgcgctgcacccactaactcatcatctagcattaggtatatctctcaatgctacccctcccccctgcccccaccccacaactgtccccagagtgtgatgttccccttcctgtgtccatgtgttctcattgttcaattcccacttgtgagtgagaatatgcggtgtttggttttttgttcttgcgatagtttactgagaatgatgatttccaatttcatccatgtccctacaaaggacatgaactcatcattttttatggcttcatagtattccatggtgtatgtgccacattttcttaatccattctatcattgttggacatttgggttggttccaagtctttgctattgtgaatagtgctgcagtatacatacgtgtgtatgtgtctttatagcagcgtgatttatagtcctttgggtatatacccagtaatgggatggctgggtcaaatggtatttctagttgcagaatcgccacgttgacttccacaatggttgaactagtttacagtcccaccaacagtgtaaaagtcttcctatttctccacatcctctccagcacctgttgtttcctgactttttaatgattgccattctaagtggcatgagatgatatctcattatggttttgatttgcatttctctgatggccagtgatggtgagcattttttcatgtgttttttggctgcataaatgtcttctgttgagaagtgtctgttcatgtccttcacccactttttgatggggttgtttgtttttttcttgtaaatttgtttgagttcattgtagattctggatattagccctttgtcagatgagtaggttgtgaaaattttctcccattttgtaggttgcctgttcactctgatggtagtttcttttgctgtgcagaagctctttagtttaattagatcccatttgtcaattttggcttttgttgccattgcttttggtgttttagacatgaagtccttgcccatgcctatgtcctgaatggtaatgcctaggttttcttctagggtttttatggttttaggtctaacatttaagtctttaatccatcttgaattgatttttgtataaggtgtaaggaagggatccagtttcagctttctacatatggctagccagttttcccagcaccatttattaaatagggaatcctttccccattgcttgtttttctcaggtttgtcaaagatcagatagttgtagatatgaggtgttatttctgaggggtctgttctattccattgatctatatctctgttttggtaccagtaccatgctgttttggttactgtagccttgtagtatagtttgaagtcaggtagtgtgatgcctccagctttgttcttttggcttaggattgacttggcgatgcaggctcttttttggttccatatgaactttaaagtagttctttccaattctgtgaagaaagtcattggtagcttgatgggtatggcattgaatctgtaaattaccttgggcagtatggccattttcacgatattgattcttcctacccgtgagcatggaatattcttccatttgtttgtatcctcttttatttcatcgagcagtggtttgcagttctccttgaagaggtccttcacatcccttgtaagatggattcctaggtattttattctgtttgaagcaattgtgaatgggagttcactgatgatttggctctctgtttgtctgttgttggtgtataagaatgcttgtggtttttgtagattgattttgtatcctgagactgctgaagttgcttatcagcttaaggagattttgggctgagacaatggggttttctagatatacaatcccatcgtctgcaaacagggacaatttgacttcctcttttcctaattggataccctttatttccttctcctgcctaattgccctggccagaacttccaacactatgttgaataggagtggtgagagagggcatccctgtcttgtgccagttttcaaagggaatgcttccagtttttgcccattcagtatgatattggctgtgggtttgtcatagatagctcttattattttgagatatgtcccatcaatacctaatttatggagagtttttagcatgaagcattgttgaattttgtcaaaggccttttctgcatctattgagataatcatgtggttcttgtctttggttctgtttatatgctggattgcatttattgatttgcgtgtattgaaccagccttgcatcccagggatgaagcccacttgatcatggtggataagctttttgatgtgctgctggatttggtttgccagtattttattgaggatttttgcaccaaagttgatcaaggatattggtctgaaattctcttttttggttgtgtctctgcctggctttggtatcaggatgatgctggcctcatgaaatgagttagggaggattccctctttttctattgattggaatagtttcagaaagaatggtaccagttcctgcttgtacgtgtggtaaaattcggctgtgaatccatctggtcctggactctttttgtttggtaagcaattgattattgccacaatttcagatcctgttattggtctattcagagattcaacttcttcctggttcagtcttcggagggtgtatgtgtcgaggaatttatccatttcttctagattttctagtttatttgcatagatgtgcttgtagtattctctgatggtagtctttatttctatggaatcgctggtgataacccctttatcattttttattgcgtctatttgattcttctctcttttcttctttattagtcttgctagcagtctatcaattttgttgatcctttcaaaaaaccagctcctggattcattaattttttgaagggttttttgtgtctctatttccttcagttctgctctgattttagttatttcttgccttctgctagcttttgaatgtgtttgctcttgcttttctagttcttttaattgtgaagttagggtgtcaattttggatctttcctgctttctcttgtggggatttcgtgctataaatttccctgtacacactgctttgaatgcatcccagagattctggtatggtgtgtttttgttctcgttggtttcaaagaacatctttatttctgccttcatttcgttatgtacccagtagtcattcaggagcaggttgttcagtttccatgtagttgagcggttttgagtgagattcttaatcctgagttctagtttgattgcactgtggtctgagagatagtttgttacaatttctcttcttttacatttgctgaggagagctttacttccaagtatgtggtcaattttggaataggtgtggtgtggtgctgaaaaaaatgtatatcctgttgatttggggtagagagttctgtagatgtctattaggtccacttggtgcagagctgagttcaattcctgggtatccttgttgactttctgtcttgttgatctgtctaatgttgacagtggggtgtaaagtctcccattattaatgtgtgggagtctaagtctctttgtaagtcacacaggacttgctttatgaatctgggtgctcctgtatttggtccatatatatttaggatagttaggtcttcttgtgaattgatccctttaccattatgtaatggccttctttgtctcttttgatctttgttggtttaaagtctgtttcctcagagactaggattgcaacccctgcctttttttgttttccatttgcttggtagatcttcctccatccctttattttgaacctatgtgtgtctctgcatgtgagatgggtttcctgaatacagcacactgatgggtcttgactctttatccaatttgccagtctgtgtcttttaattggagcatttagtccatttacatttaaagttaatattgttatgtgtgaatttgatcctgtcattatgatgttagctggttcttttgcttgttagttgatgcagtttcttcctagtctcgatggtccttacattttggcatgattttgcagtgtctggtaccagttgttcctttccatgtttagtgcttccttcaggaggtcttttagggcaggcctggtggtgacaaaatctctcagcatttgcttgtctgtgaagtattttatttctccttcacttatgaagcttagtttggctggatatgaaattctgggttgaaaattcttttctttaagaatgttgaatattggcccccactctcttctggcttgtagagtttctgccaagagatcagctgttagtctgatgggcttccctttgagggtaacccgacctttctctctggctgcccttaacattttttccttcatttcaactttggtgaatctgacaattatgtgtcttggagttgctcttctcgaggagtatctttgtggcgttctctgtatttcctgaatctgaactttggcctgccttgctagattggggaagttctcctggataatatcctgcagagtgttttccaacttggttccattctccccgtcactttcatgtacaccaatcagatgtagatttggtcttttcacatagtctcatatttcttggaggctttgttcatttctttttattcttttttctctaaacttccattctcgcttcatttcattcatttcatcttccatcactgatactctttcttccagttgatcgcatcggctcctgaggcttctgcattcttcacgtagttctcgagccttggttttcagttccattagctcctttaagcacttctctgtattggttattctaattatacattcttctaaatttttttcaaagttttcaacttctttgcctttggtttgaatgtcctcccatagcttggagtaatttgattgtctgaagccttcttctctcagctcgtcaaagtcgttctccgtccagctttgttccgtttctggtgaggaactgcgttcctttggaggaggagaggcactctgctttttagagtttgcattttttctgctgtgttttttccccatctttgtggttttatctacttttggtctttgatgatggtgatgtacagatgggtttttggtttggatgtcctttctgtttgttagttttccttctaacagacaggaccctcagctgcaggtctgttggagtacccggccgtgtgaagtgtcagtcttcccctgctggggtgtgcctcccaattaggctgctcgggggtcaggggtcagggacccacttgaggaggcagtctggcagttctcagatctccagctgtgtgctgggagaaccactgctctcttcaaagctgtcagacagagacatttaagtctgcagaggttactgctgtctttttgtttgtctgtgccctacccccagaggtggagcctacagaggcaggcaggcctccttgtgctgtggtgggctccacccagttcgagcttcccagctgctttgtttacctaagtaagcctgggcaatggcgggcgcccctcccccagctgtgctggtgccttgcagtttgatctcagactgctgtgctggcaatcagccagactccgtgggcgtaggaccctctgagagaggtgcgggatataatctggtgtgtcgttttttaagcccattggaaaagcgcagtgttcaggtgggagtgacctgattttccacgtgccatctgtcacccctttctttgactaggaaagggaactccctgaccccttgcacttcccgagtgaggcaatgcctcgccctgcttcggtttgcgcacgttgcgcccacccactgacctgcgcccactgtctggcactccctagtgagatgaacccggttcctcagatggaaatgcagaaatcacccgtcttctgcatcactcacgctgggagctgtagactggagctgttcctgttcggccatcttggctcctactccttattttcgtattttatcttttgtgaataatgctgcaatcaacatttccatgtaagtacctgtttgagtccctggattaaattctttgggcctatacccaggaatggatgttgtttcaaatgagaattctgtgattagctttttgaggaacagcaaaactgtttctcctagtggctgtacctttttatattctcaccagcaatgtatgaggattccaaattctacataatgctgctacttgttatttaacattttaaaagaattgtagccagttttgtaggtgtggtgtggtgtcccattgcagctttgactttgtattttcctaatgactaatgatgttgagtatcttttcatgtccttcttgactatttctataccttctttgaagaaatgtctatttgagtcttttgcccatttataaactggatggtttgtccttttgttattgagttgtagctagttcttgatattatttggacatgaaaactgcgtatatgtggtttgcaaatattttctctcattctatgtctattaattattgtcttaataatttcctttgatgcacaaaatgctcacatcttgataaagccctatttatcttgtttttcttgtttctcatgcttttgtatcatatctaagaatccattgcacatttgaggtcatcaatatttacctctatgtctattttgagatgtttttattgttataggtcttatatttaactcactgatgaattttttagagaatggtttgatatggtgggaggtagagttatctaaattcactgttttgcatgtggttatctagttgtttctgcactatcattggaaaggagaattgttcctccattaaattgtcttgacaccctcttcaaagagtaattcaccataagtgtgagggtttatttctagactctcaattctatcccatttgtctttatgtctattcttttgccagcagcttacgtctattctttggcagcagcttctgttttaataagtgtactcctttgtgagatttcaaataagaaagttcaagtcctacaatttattttggcaagattgttttggctattcaggggtccttttgtgaaaggtggggaggccaatgtttcacaattgggaaagccttttctgtcttcttcatggggaagtttgggagaatcttttaagaaacttaatctaagcaggtaaactgtcaccattttatttgctgaagtgctatgttaaagtgtgcattgcctcttgtggaagaattgtgagaccctggaagctcttgctcacatggtgagagatagtgaattccatgatgaggggcagagaggacagtgttttgggatacaatgttgttgggggagttgtatacatctcaacttctttatgtctctgtacagtgggtgtagggaccagccacacagggtcggtgggtttttctccccgtgtgcagagatgagagattgtagaaataaagacacaagacaaagagacaaaagaaaagacaaatgggcctgggggaccactaccaccaagatgcggagaccggtagtggccccgaatgctaggctgcactgatatttattggatacaagacaaagtgtcaggataaggagtgtgagccatctccaatgataggtaaggccacatgtgtcacatgtccactggacaggggacccttccctgcctggcaggcaaggcagagagagagaggagaaagagagagagcttacagcattatttctgcttattagagacttttagtactttcactaatttgctattgctaagtaaagggcagagcctggtgtactggatggaacatgaagggggagtaggagcgtgtccactgaagcacaacatcacagggaggcagtcaggcctttggataactgtgggtggacctgactaatgtcaggccctccacaagaagtggaggagtagagtcttctctaaactcccccggggaaagggcgactccctttcctggtctgctaagtagtgggtgtttttccttgacaccgaggctaccactagaccacggtccgcttggcaatgggcatcttcccagacgctggcattaccgctagacgaaggagccctctagtggccctgtctgggcataacagaaggcttgcactcttgtcttctggtcacttctgactatgtctccccagctcctatctctgtatcgtctggcttttcctagggtatgattatagaccaaggatttttataatattggaataaagagtaattgctaccaactaatgattaatgatattcacatataatcatatctaagatctatatctggtataactattcttcttttatattttattatactggaatggctcgtgccctcagtcttttgcctcagcacctgggtggcttgccgcccacaagtgggcatctccattggacacagtaggttttgaaatccttgtttatcctctggggtctaggtcttggcttgcctgttagctgcagctgaaagaggtgtctgctaaggcaatgacacctgtggggagaagaaaggttcagcagagtgaaagtagctgaggctcagagaggccaggaaagtctgactcttagaaaccgtgggtcagcagatgggtgtcctcacgggtacatgggcgatgccggtagccactgcagtggactggaagaaggtaagtgatgctgggtatcccatgttctctctcagctctgcagctgaagatttgggccttgggctggtacggccctgcagcaggggaagggtacacaggaatggctgcatatcgggacgaagtccatgtcatcttcttaggcattgttactgcagatggaggattctgttcagagacctggcctggacacatgggagggcccaccccattcttttaaaattattttaagagaacagtattagcaaatgtggtacatgtcttattctgctagaatcagtcttattgtcacgttttacaaagtatcttttaggaaatggtgagagccatccacactatgtggatttaaaggggactctagtataatttcagctttcctactctttatagaaaccatcttctctgcaaacacacaggcaatatctctgtgttcatttctattgggagccctgtatgcaaggtggagagtgccacatttccctctgagatgttatgtaaaagtttgaggtggagatgacatatctgacactctgttgttacactcagaagctactacatgtgaaattctaatgactgcattatcctgccaaataaaaggcaggcatgagcaaggacagtaaagaggggtgagagcctcatcatgatggggagtcttgttctgacatcttgggaaaaactgtccacagtgtgaagtcatcaacttcttgtcctggtttacaatttgagtggctgttgttatggtgtcaaacattttagtgagttctgagtggctcacgcttcaggtacaagggttttcccatgaaatttacattgagttgtccacctccagcttatagggcttctggaacagaatgggtcttgctcttagtgattccatgggagaaaatggaattggaggaactagtagaattcagggtaatgttcagtttacaggtggataataaaaacacagaaacaatgaacagagctgcaatctcataaccggtgtactacagtttttattttccacgtaatttttgtctctacgggcatctctagttttaccaatgataatttcagtagaataagtttgtttgcaaaataggttgagtttcttcaaacgtggtctgattctttacataagtgcagcaagagtagcaatggaccatgtagggtctcttttaaaattttctttcctctaagtttttataaggaatctgagattaaacttttacaaacctcttgagaataggaagccaaaccaaggctgacttcagactttgcctgcagttcatattggttcattctatgtatattcttaaatataacatcccagtcaaagccttggtaatataaccaatgatttgaaatgtgtcctgttacaaagagagcagattgttactgtacttgtgcaaatatgtgtattaccataaacatatcaattctcatgaatagttgcccaattctggggcagtcaggtagagagcaaaagtaaatatttcaataattgttcccagaagtatagtttattgaactgctataagctatagatagattaaaagaaaaaaattccataaatgtagaatacaaaccatttaaagaatcagcaaattttcaaataaaaatcataaaaacattatcctcattattatcaatatttcaatgaagtcaatgtttttcctgcttggtaggctgagagttttatgaagatatcagcctgttagttaaagtttttggaagttcttagacagtcctgtgggataatgtgaaagttatcggaaacttgtattaaagagtacttgtcagcatcttttctacaaatctccttgaaaaggaagcaattttggactgtagctgattggaaatgctttgaagaagaataaaaacaatgtctgttagtgggaaagattttaaatgactatggttaaaactctgatgagaattcattgataacacagctcacataaaaagttagttacttctgtagtatatgacattgtggctgataacatacttaatttctaggaatctcatacaatttctggaacaatcatatcagtaacatatccataaatataacatagagaaggtttagcatcctttaccatttatgatttgaaaatgcttttcatataattttacatatcaaataaagtggcttttccatgtagcttgtgtttctcaacaggattactgagttcttggtggaggctgttaatgaattgggccaagaaagtataggcttatgtatgctgaaaaatttccctagataattccaatactcccagctaataatcatgaatttaggtctaaattttacctattagaacagctgttatttatcctggttacacattagtagcatctgggaagacttaaaaattaccaatgcctgagtctcactttagaccattaaattggatcctatgggtggggcttgggcatccatttaaaaaaatgttttctggtgattccaatgtgtagctgtatttcccctcagatttctctgatttcttttggcattcacttttttctattttggtattataattattttttgggtcttatcatctatcttaggctttatgttccttggggtagaaaccttgccttcttcatttttgtatctttcacgaacatatgagttggtcatcaggaaaatgttctcaatcacaagtaggttgtgttctgagtctcaggtttacacattaatgcttgagtcattgttctctgggaggtgagaggttgcttgtgatgaagggtatgggtaagcccatactgcagatggtagatgggagatcaccctgttttcagccatagcattggaactaagcattctatgtgtatatcaggtggaggggaagggatgtgtagaaagacagatttaattagaatggaggaattatactagggaatagaagtatttaaagcaacaaaaattagtaaagagaagaaatgtgaacttatcaaataggcaagagtagatccctgaagatttttgaataggtgagttaactagaatttaggaagctaataagacagtcatacacaaggaagatttcaaagactggagataagtcaagcagtacctctagcagttgttgaggttgtgggaatggagagaatgacaaaagtgagaaatgttataaaaaaggatcaagagggttttataaggtattgaatctgggaaacaaatgagcagagactgaggataatcacttgtaggagacagtggggtacagggagcatgaagaacaggggagaagagacctgcaggaataaatgctgagaagcaggagtttagtgggaggaggaggagatccagtcccaaataccggcaaagaagtcctttccctctcccaagcaaggcagtcagccctgcaggaaacaggacaaaaggaaaagccatcatacctgccagtcttcctgaaataaactacaacagggctgctagatcagcgccacactggccagtacttcaatcatgatgctgccagtggctctacctgaaaggccaggagaacttcctttcactgaagtatctgtcatggaaagaaaagaagagaaggaataaaggtgatgttattttacagcgtggtaccttaggaaccatcactaagtatttagtagtttctactttttccttcggggattacattaattttgtgggacggttgctggtagatgattagccaactatattcttgcagtttttttctctctcaacgtgtttctaggttagtgatcagtcttctgtcaatttcatcctgaccatgctgcactcagatattttcgaaagctttatgatgtgagaaaggctgactgctattttctgtcactagaactttgtaccctttcatggttgcatctttttctcagtgtgtcagttgtggtaggcatgaataagactctgtcaggtctccatggcagcttgtgtttctcaagaggattactgagtccttggtggagcccattaatgaatagggccgagaaagtataggcttatgtatgttgaaaaatttccctaggtaattctagcactctcagctaataattgattaattaataatcaactgacttgattgacagaaggcccagatcagtgcattccaaactgacaacctactttgcatagagtcctcactttcctgaagctctcagcagggatatgaaagcaagcccagttctatgagactctgttttattctcctgggtgacttgtgggaagaccccctatcagtcttcccatgctctctttgaactgtagctaaatctttgtctttctccttcacaggaatgagatttgcatagtggtcccaaagttccccagacttttttcatgcctgccccactttccctcccaggcatttttcctaatacattatcctgcatgtctaatctcatctcggatgcatctcagtgggcataaactaacataccaggcttgatttttttgcacttagcttttttctgtctctcccacatgtagccagtaaccatgtcctagtgtttcatgtgttacccttttttcatgtgtataggaaaaaaatatatatttccatatacttatttatatgtaatatatataataaaatgtgtaatataaaatgtataataatgtaaaacatatacatattttccatatatgtatatggaaaaagaggtaacacataaaacaccaggacatttacatataataaaattgacatatgttatatatgtatgtagtgtctggtagtcttaccctctttataaatacacactttttgtcactgccccttccttccttcccatgcagagctcctatggccaaatctccctacttctccaagtttgtgtcactcactgtcctctgtgttgtgtcccatgtgctgtgtccacagcctcctagtgttttatgtgttctctttttctatatatatgtggaaaaagcatatacatatttctctgtatatatttatatacaatatataattatctaaaaatatagaatatataacaatttaaaatatatgcatatttccatatctatgaaaaaaggtaacacataaacactaggccatttatatataaaattcacatatgtaatataaatgccaattttatcatatataaataagtatatccatatagacttatcatatataaggtgaatttggaatgccctgacctgggccctctgtcagtcaagtccctgccatggaggccattcatggctgccacaactgagacactgggagaaagatgcaactatgaaaaggtgaaaagttctaaagtcatagaaaatagcaatcagcctttctcacatcccaaaaccttcaaaaatatctgagtgcagcatgtccaagatggaattaaaaacttcaatcttgaaaaggaaaaaggaagctggaggattcacactttcagatttcagcatctactgcaaagctacagtaatcaatacagtgtggtactggcataaaggaggacatagaaatgaatgacatagaatagagaacccagaaagaaagcttgcatatatggccaaatgatttgtgtcaagagtgtcaagcccattccttggggaaaggacagtctttttaacaagtgatactgggaaagctggctatccatggacaagtatgagttgaacctttacctcacaccatatacaaaaaaatgaacccacaatggatcaaagacctaaatggaagagtgaagactaccagactcttagaagaaaacataaggaaaaagcttcatgatattgaatttcagaatgatttatttgttataactacaaaagcataggcaacaaaaaagggataaattggacttcatgaaaattaaaaacttttatatatcaaaggccattatcaagaatgtaaaaaggcaagctatgacatagggaaaatatctgcaaatcatatatctaataagggattaatttccagaatacatgaagaacactacaaatcaaaaacagcaaaaacagaaaagcccaattaaaaaatggacaaaagactgaaagagggattttattaaagaagatatacaaatggccaatgaggacatgcaaggattctcaatataactaatatttagagatttgcaaagcaaaaccacggtgatacatgacctcgcacacattaggatggctttgataaaaacaacatgaacaacaacatcacaaaacaagtgttttcaagtacgtggaaaaattgaagctctttgtgtgttgccgatgggaatgggaagtgttatagccactgtggaaaaaatggcatggcacggccggctcatgcctgtaatcccagcactttaggagccgagatgggtggatctcttgaggtcaggagtttgagaacagcccggcaagtgtggtgaaaccccatctctactaaaaatacaaaaattagctgggtatggtggcatgcgcctgtaatcccagctactcaggacgctgaggcatgagaatcacttgaaccttggaggtggaggttgcagtgagccaagattgcaccattgcactccagtctgggtgacagagcaagaccctgtctcaacatcaacaacagaaaagaaaatggtatgtcagtttcttaaaaaaaattaaagcattaccacttgaaccagcaattctacttctggacatacagccaaaagtattgaaaaatatttgaacagatatttgtacactgatgtttacagcagcatcactcacaatagccaatgggtggaaacaactgaaaagtctattgaaagataagtggatgaacaaaaaggtatatccatactttggaatgttcttcaatcttagcaagggataaaattttgacacatggtgcaaaatggatgaaccttgaagacattatgcgaagtgaaataagccagacacaaaaggataattattatatacttccatttatgtaagatagttagaatagtcagttacttagagacagaaattagaatggtgattaccaggggttaaggggagaaggaatgagagttatcatttattgggttcagaggtttagtatagtaggataaaaaaagctctggaaatagatagtgttgatagtaacacaacactaaattgcacgcttagaaacagttaatagtaagtcttagatgtatagtgtctggtactcttaccctctctgtaaatgcacactttttgtcgctgttcctcccctgccatagagagcttctgtgagttaatctccctatttctccaagtgtccatcactcactgtcctctgtgttgtgttccaggagctctgtccacagactcagacaggcagtgacttcagagccaggacacagccctattcccattttttaaagccttacccatgggaggcttggcttctactggcagctcgatttagccagattcagaaccggccacccaggcaccttatccacatgccctggccccagcccaggtggagtcagggcagggtcagtcactgggcgagcccacagcaatgcagggagcagagtctgagctgcttctccctcaccaaggggcttcctcctctcattggagaaaagtgtgggcttgttttgaagcctctgatgttcatcgcagctcatggagtacacacacacacagacacacacacaaaggagacagaagggatgttttggtgacagaaacagcttgaccatgaggaccctcctctttctccctctgtgaaggcccttacactgcatagtgcttggggctgataaagccatttccctacatttctcaggctggacccaaggtcatccaccagaaatctggcaaacaaagggaagagaatctgtagatatgaattgggagtgttcaggagaaaaatttgggatttacttttgtgcatgggacacaggctgagaataaaaatgttttcctggctctttcttggaaagccagataggcttcacctgaaagcatattgccaatgctccagcgatccacttaccagggactctgattttcttggttgcgaagtttttgccattagtgactgggttatggacataacacagatagtccccactattctcagtagtgacttgggggataaagagctcttgtcctatttgctggttattcccattcagcagccaagaatactctgctgatgggttagagcccatgaggcaggagaggttgaggtttgaccctggatagtaataggtgtctgaagaataagttgtgggttcatctgggccatctggagcaaagagaataatgccacaggtaatgttatcagagggaatgggaagctcctggtctgtgaaaggggcacagtgttcctttttgccaagtcacaaccccgaagtcccagccaaacttcctctgtgttcactgaactggagtagtctaagaaattcacgtgttctcccatcacaagctgtggaaccagagtctcctaagaccagagaagcccctcccctcctgggcctacccaggtttttctggggcaggaagtcatggccagcttgggggtccaggggtaagtgtcttcatacttgaacctgagagggactgagaggcctggcctcatgttatgtggatttgggccggcagccttgtccatgaaggaaaagaggatactcacagagaacatccaggtgactgggtcaatttggctggtactcactacattcttcctttgacattcatagagtcctgtgtcactccttgtgatactgagtagagcaaggatcctgttgtcattggacatctttagcctgggactgagtgtgagtctatgaccatttacccaccacatgtagattgtgccatgaatgtcaggttcacaggttaagaccacagcctcctcatcctctgtggggttgctggtgacatagggcttgggaacattcgctgtgcagataacagagaagattcccctgtgtggcaccactgatttctccatgagcattttccaatcagagttgacatctcccacctctcagcaaatctaagtccttaaaagcccacagcaggtctgtgtgtcaaaagacagatggatgcatgatgatctgagggctcagaggccatggggccacctgctctgtgtgggagatgcacagacttctgaagtgtggattgagcagcaatattggtgaagtgtgaattgagcagggtcaaacaattagagtttgattaactttgtttaaattgagcagagcccaagtgaggcagcagtggctcatgcatctccccaaccgaagcaccccaccttatgacaatgtggttattatgaatacacaggtgtgaatgaaacaggcagtaaatcagacagcacccacctggccagctccacctggtcctaggaaccaccattattcccattatgtgtatgttacagctttttaggctacaaaatataaaatacaatcacagaatataaaatatgctattgtcaatacaaaatattgaatatgaagctgaatatgttgttccactttttctcactcttgttaagctttgctgattcagttttggaagtttctattgacacacacttaagctagagattctttcctcagctgtgtgcagcctaccagtaagcccatggagggcattctttatttctcttaaagtatttttaatctctagcatttcttttgcttctttcttagaatagccatctctgtttaaatcacccatctattcctgaaaggtgtctcctttttccatcataatccttaaccagagttgttttaaatttccagtctgataatttcaacatccctaccacatctgtgtctggttccaatccttgctctgtctttcaaactgcattttttttttttttttgccatagtctgtcttgtatttttttgaaaaccacacatgatgtactgggtaaaagggacttgagtgggtgggcattcagtgacacggtggtgagtgttgggagggaagggttctgtggttctggatgagatctgtgtcctgggctgtgaatgtcacaagtgcctctcaggtttttctttccattaggtgggatatgatgacttgaggaggctggagttggatacttcccctccccctggccagttaagctcccatcaaaccccagctaattaggctgcagtaaaatagtttctcttaaatttaggtcttaccaagaagaatataattcactgacaactttccaagtgtttttttcccttcttcctagaagaaggatgtggattctttttggatattgactgtgagaaactggtagagctccaggagctaagagtcataaatctgtccccctactcccaagactaatccatccactggtgtgtttatctctgcactgtgtccacactgagcctccagaatttcctcaattagagttcaggttttctgaccccagcacttgttcccgctgaggtttctgtgcctgtgtttctgctcaggtacggtgcgctgctctgtatttgcctgtgggtctctccaatatgtgggccagttagcactgagaccttgcttccagagaaatctaaatgagttgttgatttttcagtttgttcagctttttacttgttgttagaactgagtgaaaatttttaagctacttacatgcctgacggaaattcgaagtgtctagggcatgactggaggatatgagccccacagcaggttgaggatggagtcatgagtgaaatgggtgaaatgagcccatgggctttggaaactgcagatctgtccttctgcctctgaccccctggtgagtccatgaagaaagtgaaaccacctttgcgaagcataagatggtgagaggaagctagcttggctgaccgcatctcacctctagtctcaaactggccctcttctctgattcctggacataggccagggtaagcatgggaggaatttatagtttaactttgaagcaaggatgataatagtccctccctaaaattagctcctccttgtcgggggctaccttggtaaatctaagaaaagaccacgaattatgggaggggcccaaattctgctaaaatgcaggcatagtttctataatcccttacttctcaggagtcatgtatccagaggtcacaagatttgtgactttcctagttgctcctatagatagcaagactactgtagaatctgagatttatcttttgagatgtttcagacttttgcattctggcaaccagctgacctcatctagactcatgaccaatggctaaaccagtcatgtggcccccactcagaggcagattcaacaaatacataccattttgcctacgtgcatcatttcatctccagccggtcaacagtacttattccttagacctttgccccttcaaagtttttgaaaaactctaacctcagagccattggggaaggtgatttgagtcataataaatttctgtcctcctttttggcagccttgggctaagcaaaaccattctttactacacatcaccttcacaataaattggctttgcctgtgcagagggcaagaacctgtcaggtgattgtaagaatggatggaggagtcactgatctctttcaggtggcctgtttcatgagtcagcctctcagagggaaagagccctggactgggacacagtggaagctcattctcctggtgacccggggacattgcctcattatggatcctggcaggggtggctactctggctgattttggtgcatttttcatttcccagaaggcaggacaggcctcagtgtgagcaggaaggaaatggaaccgtcaatcttgttagagagggtgtctgggtaagtcctcagggtggaggaagctgtgcaggacagggctcatcaggtagaatgaaagggggatgcacttttttcactgaacacctttcagatgtctcaccaactctggcctcactgggctctgcctttccttctgagcccagagccccgagccctgattcctgggagggaggaagagagagaggaagggtgaagctgggatgtgtgctgtccaggtttcttccatctctggaatcttgaaagcgagggaccctagtgtgttaccacagaggagaccatgggaaaaagctgtttctcaggggtgcctggcttatgaattgaggggaattcagaccaggttggactcgtgaactgcagggactctgttccatgtcagcaaccagctcctctagctcagtgtttctctctgtggctaattcttttgtgtgatttctgagcccatgctagagtcctcctcacgatgcctgatggtcagacctgtgtggggagacctaatgatggggtgggggtggtcttgagtgtcacacagagtgtccagggaacaggctttgtgactttctctaccccagccccacaacaagatctggatagtgggcttggtcagataaagtcagaatccatggagggagggtatgtgtcctggcagtactgaggttcctgcctccaggttagttctcagtctctgcaaatacatttatgttgtgcatgtgctgtttcctggactgtttcatgtccctaacttcttgaacctgtctgcagataatgtcatgagaggtctgcatggaagtatatgagggctctctgattaggatgggtgtgttttacatagtgggtttttttttttcaccaaattgtggttgagtgtgtatatagaaacacatacatacttatattcattagatttgactatttatataaatttaatatacagatacatttctataaatatacacatatatgtatatgtgtatatatgtatatgtatatatgtatatgtatatatatgtatatgggtatatatatgtgtgtgtgtgtgtgtgtgtgtatatataaaatgtgccattttaaccacttaaggggagagagagagagaagagagtttctgctaataccaaatctgggttaaataagggtggtcctatttcctggggttgggcttttgctagatgtgtcagttcctgttggaagtgaggtagagaggttacatgcttaaccaatgtagagattttctatatgaaaataatctgtgagcacactgataagttttatccttttctaggtgaaaagcttggtgaaagattttaaggacttcccattggctgaaggctggcaaatggagtttgctatcctctgactgcagccattctgaggactggaaagaataccctgagaaggggcctattttatttctgcaggaaggtactgaggtttaatttatcttatggagtcttcctagattagaaggctttgaggtgtgttgatgccttgccagtgacttagctgcctgatcagtgaacctatttcctttggctacatcatctgttccccttttgatgttccctataatgtatcactgctatttctcatggaagaaaactgaggataataacctgttaattttttggtgatattttacaggaaatccattagtggtaagaaaatgccttttattttaaatggcagcatgagcatgaagaactcaaaaagcatacttggaatcagtgtaaatgttagctacctttcccttgcttaatttaagtgctcttgtaagaaccatttgtttagctgattgagcacctgcacctgaagggagatgttatttagagtgactactgcttatcctgccatatatatttcttgctttaccagctgtttgttagctaagagctccctctagaggaaagtaattttgccacattaagtggggatgtaaaccgttctttcctagggttaatttggaggcttttctgactagtagagctattgtgacagtggtttggaagcagatgtaaacaataggtcctcctaatggcaaataagaggttgagaaaaatattggattagaatttttcctgagacaccccttatggttgtgctatgggaagaggggaggcctggataagaaaggagaaaagagagagactagatctagtgtttagaaggaggtctactttcctccctataatttccagaatgacctgtgtctcctgtgctgtaatggcagtttgagctgctggagccaggggtttgagccccaggacccatcagtcttgctggaccactgtgagactggtactgaacccagtgacctccaactctgggagcagttgcatctccagtggtctccaccacaggctggtcattgtcaaggtggcttcctcttgctgtttggacactccttcctaaaaatgccctggcttgccacaccgagagcaactagtggatacacctctgggatcctggactttgcaactctgcaaagtagctattagaggctttgtccttctcttgagctttctctctttcttctgggccttctcctggtccctattataaaagactgaagtggctaccctcagaaggttttccaaggtgctatgtgctactatagcttgccttttgtaggttccttctaatattgggagcattctgtataataaacttatctttttgaatgggctgtcacttgagtgaatcaggagataaaaaggtgtgtgctaatagtgcccctcttaacctatccataaaggctgcaggattctcctctggctttgagtctatcatagacagtttagaggaattaagaggtctggccttagtttttcttttccattcatctgctgagctattggggcttcaatcagggttgccaagaggtactgcttcacttcttatttggaatggtgtttctgctatttcttcactttctgtatctccttccttcccttttggtgtattataggagatatgttgctcatcttcaaaattctctggtgcttgtagagctggctgtttttcagttacagttagggtttggtttaggagcagcataacatccttccatgtgaggtgaaacacctgacttaaattctggaaagcttctatatacctatcaggattgtctgaaaatcagcctaagtcttactttatttgcctaaggtcctgtaatgagaagggaacttggagggaccccaaattatggggattcttctcagatggttccctgggaagttgcttttctaattctaggggattattctttataggccttcctgatatggctgttaaaaaaatctgggttgctgttacaatgcttctaaagttttagtaaaaatgccctgtcattgtgcaaaatagaatgagttgcttttctcttcaaagtcctgaggttaaaagagttctagtgcctcagagtgcactccagaggggtgcaaactgaagatgctctgttagccatcgagaaaaagaagtgagaataaaagtgtccttatagtcccccttctttcattgttacccagagtcatgtggaagacagtgggagcatccccccaactgttttctctccttggttcctgagtcctggcactgtgttaaatttgccacccatggttgtaggtgtggccctctaagccatggaactggataaatgaagtgatgacattagccacactttacccatgcagccttagcttatctgcctgtgatctgcctggcctcctgaaaaatggatctctggtgaaattgtaatagttgcctttgagcaagctttctttaagagagggaatgtgccagttgccagttatggcccatgctaaaacacttaccctcagaaaagtggtcctggttgactctgttcttaaaatgtccttactaattaaatactgttctaattggagatagaataagtaccttaaatgaacgtagggacctaatggcagtttttcctgctgatgggacagtatcggaactaaaatttggctatggaagacattttactcctaactgttgaaagcagagctttcccattcacagaaagggcttttctatcagtgcaaaaagagagaattggaaaagtgcagtgttatggcaaaggaccaacaatgtgcctcataaggaggatttatgtttccactaggtgacactgttggcttagaaataccaagtgcttaccaaaggaaggagagagagagagaaagagagagggagggacctattgggttagttattataccatgtaccgatctttcctaacagaactgtttccctgaaccgtaaaaatttccacatattgcaaacacaaaaagaacaggagacatagagaccatggatagaaaggaagaacaaatttgcaacaggatagcaaattaggagacccattaccaacatctggatgagctgccggaagctgtgttcagtccagaagcctttgaataacatcagggtgtttcctggccagaaattctcagctgctccatgacatcccccagcgtcatgtgatggtgaggttctccatgaaaggaaactagtttgaagagaaccttgaaattaaaggacagatttgaggtttgctccatactcaccattctgatgtttctatcttctgttctgatcacaatcccagatgagaactcccaaataaaatggctctgtttgggaatctattcatggttctttgtcacacactgagaaagaattcgggacatggaaacacgtgaggagtgggtttaggagtgaaaaatttaacagacaataaagaagagagagagaaaaagctttctcatactgagaaagcagtcacccgagagagggtctccaatttgtggtggaatgcaattgattttgtacagagacttgaggaggcagtgattgatttacatagggtccagggtattgttttgaccaggtgtgctgtttacgtagcccgagaaaagactggccctcccaccttaatcttttattatgccattgtggcttctacctggtggtcatcatgacacctgcacatatggtgacaaggaaaaaagtgcaggaactgccatattgggagtacctggctcttagttgcctgcatctgtatatgcttatctatgcttgcagcctgatcattcagtctgttttctgttagaaatggtttgggggctgcgttttattaaaggaaaattccaccaagaattcttttaccctttctagctgcctaaaaataatttctcaataactcctgtattaggacccctttaggaaaacagaaaagaagacacagactctcctgtaggaaagtaaccatagtttttttgtcatggagccccaagagttgcaagtgaacggatttctctcaggtctaaaactctgctcttttctccattgtgttacctgacctctttgccttttacattactttgaactgtaaaaatatttgaccttgtgtgtgtaatggttgctgggtcagtggtaagagctatggttttgaaagtgactaacagtgattataataaattattctggcttcagagggctactcatttccttgcatgtttagatgcaaaagacacagtttaaacaattagggaaatgcctttgtagcaaagtactctgtggaagtgttgcacagtatggtccccactgcattgtcctcttcttggggacctgggattcagtgaaatccttgatttttaatgtctaaatgttgtcccttccaactggtgcccttttttacatatttaaatgattagaatctaaaaattgcaaagactttgttggccctcttccttaatgggctctaccttgagcacagtgattcagttgaagaaaagagaccaaattaaaagctacatctctaaataaacaacaggtgctggagaggatatggagaaataggaacacttttacagtgttggtgggagtgtaaactaattcaaccattgtggaagtcagtgtggcgattcctcagggatctagaagtagaaataccatttgacccagccatcccattactgggtatatacccaaaggattataaatcatgctgctataaagacacatgcacacatatgtttattgcggcactattcacaatagcaaagacttggagccaactcaaatgtccaacaatggtagactggattaagaaaatgtggcacatatacaccatggaacactatgcagccataaaaatgatgacttcctgtcctttgtagggacatggatgaagctggaaaccatcattctcagcaaaccatcgcaaggacaaaaaatcaaacaccgcatgttctcactcataggtgggaattgaacagtgagaccacatggacacaggaaggggaacatcacacaccagggcctgttgtggggtgggaagagaggggagggatagcattaggagatatacctaatgttaaatgacgagttaatgggtgcagcacaccaacatggcacatgtatacatatgtaactaacctgcccgttgtgcacatgtaccctaaaacttaaagtatactaaaaaataaataaataaaaccccgtggtaaatttctattatttttgtgttaccttggcatctctttttaatcttccttgaacacaccaaattttttcttgaaaaagcttaagttctctctctctctctctttgctttgagatgtaaatgtgctatttattttctctaaaactcggtaaagccttcctcagataaacgttaacctttaccatttacaagaaagcaatttgaatccaactatcctttaaactggtgggttttactgatctcatgcctaaagtcctaaaatcaaaattctaaaatccttttgtctctctctatctttatgtgaacatgtatatgttatatgttttatcacatatatgtatatgtcacacatttatatactgttgacacatagtttcaaattaatgtaaaaataaatgagtactcacaaattaagtgaataagccaaaatgcttttctatacatgtgattttaataacctttggtgaatatagatagttttaaaattgttggaaaataaagtataaacgtcttcataatttaatttatacgtttttgcctaggtctgttggcaggcaggtttatattgtctttactagatgttttaaggtcatcaaacagttgcttccatatatatacattttcttaatttgtctgtgagcttatgtctttatatttgaagctttaaattctgagttctagatgagtgaccatagtaagaactggggacaaaacccatcccagcctctggctgtgccttttggccatgctgggagaggtgagattatccaggcattttcttcatagctctgttctttgtcttgggctttgcatctggtacatagttagaatgatttactccctagtttttttctactgaaaataaggctgtataagtctgtttttacattgctacagacaaataaatgaacctgaataatttataaagaaaaaagtttgaatggtctcatgattcagcaggttgtagagtaagcatgattctggcatctgctcagcttttgaggaggcctcagaaaacttacaatcacggagaaagccaatggtggaggaagacatcttatataatgggagctggaggaagagagcaagggttgcacactggtaaacaaccagataaaaactcactgttgctacaacagcaccaaggagaatggtgttaacatatgagaaaccacctccatgatccaatcacatccaaccaggctccacctccaactttggagattacaatttgacatgagatttgggtgggggtaaaggtccaaaaaattattattctctccatcttccctcccaaatctcatgcctttctcatatttaataatataagaatggcttcccaaccatctctagagtcttaactcattccagcattaactcaaaagcccaaaatagcaagtttcatctgagacaaggcaagttcctttcacctatgagtctgtgaattcaaaaacaagttagttactttcaagacacaagggagatctaggcattgggtaaatactcccattccaaagggaagaaataggctgaaagaaataggatacatgccccatgaaagtctgaaaccttgcagcacagtctttaaaacttaaagctccaaaataatctccattgaccccatatctcatattcagggcacactgatgtaaggcttaggcttccaaggttctgggcatcacaggaacattctaagagagtcacaaaagaatttgtagtgtggcttttgatgctaaacagcgtattagaccaagtaagtcactgaagagaaaaaagtcagaggagaagatgggtgagggtgacagaaatggaatggtgaaaggaaaggtctgataaaaatgtttaccggctgggcatggtggctcacacctgtaatcccagcactttgggaggccgaggcgggcagatcacgaggtcaggagtttgagaccagcctgagtaacatggtgaaaccccatctctactaaaaatacaaaaattagccgggcgtggtggcatgcacctgtaatcccagctactcaggaggctgaaggcaggagaatcacttgaacttgggatgcggaggttgcagtgacctgagaatgcagcattgcactccagcctgggtgacagagtgagactccatctcaaaaaaaaaaaaaaaaaagttcacccaagggctcatctggtaccttgctctgtgactaatatcttacacttttgatttactcttccactttcattttctgatgctcaaagggtcacccttctgctgaagatgagaaaagaggctgagggagctcaaatgagtggtctagagtcatccagctacttcatagagtttgtgtgtttcaccttgacatttgcgcacagacagaaaagtgagacatggaaggcaaagcaagtttttgctgtgggtgacatttatgaaagttacctgtgtttgcagaataatggactcctaaaatgtttgcaccctagctccagaacctgtgcatttacttttcttggtaaaaacacagtgcaggggtgataaaattaaaatcttaagatgtagatgttattctagattatctgggtgggcccattgtaatcagaagtgtccttgtaagtgacaaagaaaagcaggggcatcagtgtgagaatgatgagcctgtgaaactccactggccaatgctgggtgtgagcatgcatcaaaagacaaaattacaactaatgtagttatagattttatttttcatttattatttgaggcagctctcactctacaaatatagtgacagccctccctgggctatacaataacaaaacagtgggttttgtcaagtgggaaccagtaaacaaagccatataaataaataaattggttaacattagggtacttcaggtctcttttctgtaaaagttaaagcagaggaaacttttattatgctgtctcaggtagagtggaatctcctgttttcaacaaaaaacaaaggtctgttctggtatctctttgcttcattaaaacttcagttgtagactgtagcatttagcatgagtcgttctattttggagtctctaggctctcacttaggtgagagtgtgaccaaaatttaaagcattggcattcatctcagtaaccatcattttgggcttccatcatttatgagtttatgatgtcttcctgatcacacatttctttgagtttttgtcatttcagccaaagagagaccctttggtatttgttgatggctgcacacaaaactttttaaaaactcttgtagaattcaccacaccaaaatgtagaatttaaaaacctgtagaatttatcacaccagagaggctactagtatgactattaggaggataataccaaaagtttggagtatgcactttaggcaagatgcaaaccaagtaaaatagaatagatcaaagaatgagccagaagagtctagcaattttaaccaagtagtatgtttggtaacttctgtgattgagtcattatgatactcgatgtatttgtttatgtgcaacaatcagtgtcagaaactgcacaggctcctccctgttcagctggtagggaacaattttattatgtagcattcgacggctcattaaattaaaacagggagtgagaacaagtgagtctgaaaatgtaactttaaaaggggccactgtacatttgaagaaacaattgtgttaaagatggtgctaatgtcagccattgggtggactaaatgatatcttatgtaaaaatttgagggtgacatgatatatctgtcactctgttatgctactctcagaagctacttcacatgagattctaatgataccatcatcctgccaaatgaaagaggcaggcataagcatggacaaattaagaggggtaagagcctgattttgatgtgaagacttgttctgacaacttgggaaaagcttttgacagtatgaagttgtcaacttcttaccctggttttcagtttgagtgtctgtagttatggtgtcaaacatattggtgagctccgagtgactcattcttcaggcacgagggttttcctgtgaaatttacattgagctttccacctccaacttataggacttcagtaacagagcagattttgttcttactgattcaataagaaaaaactggatgggaggaactagaagaattcagggtctagtccagtctaccggtgaataataaaaactcgaaaacaatgaacagagctgcaatttcatagcaggtatactacactttttattttcaacattatttttctctctataggcatatctatttttaccaaagaaaatcccagtaggacaaatttgtttacaaagtaggtttagtcttatcaaactttgccaggattctttacataagcgcatcaagagtagcagtggaccacagaggctcttcctaaagtttggttcgctagtttttataagtagtctcagattaaacttttacgaacctcttgagatgaggaagccgaatgaaagccatcttcagactttgcctgcagtacatatgtgtccattctatgtatattctcaaatataacatcttagtcaaagccttggtaatataaccaatgttttgaaatgtgtccttttgtaaagagaagattcttactaaacttgtgcaaatagctgtatcatcataatcatatgaatactcatgaatagtttcccagtcctgggacagttaggtaaagagcaaaaatcaatgagcttcaattattgtttccaaaagtatactttaccaaatttctttagatataactagcttaaaagaagaaaaattccataaatctggaaaaaatcatttaaagaatcatcaaattttcaaataaaaattataaaaacattatccacattatcatttatttcaatgaaagtatttttgttctgcttggtctaggttggcacatttcatgaaggcatcatcctgtttgttaaagttttgaaagtctatagatggtccagtgatataatcttgaactgctcagaaacttgtatgcaagagtacttgtcagtatcttttccataaatcttttgaaatagaagcaattttggactgtagctgattgcaaatgtttcaggaagaatcaaaacaactatctgtgaatgaccaacatgtaaaatgactattgctaaaactctgataagagtttggtataagaaagggagtaactccagccagtactctagtcatgatgctgacagtggccccaactgagagaccaaaagaactttcttatcctgaagcagctgtcatggaaaaaaaaagaggagaaggaataaataataaagacagcaagggttttagccaattattttttgagatagggtctcactctgttgcctaggctggtgtgcagtggcacaatctcagctcactgcaacctgtgcctcccaggctcaagcagtcctcccacctcactctcctgagtagctgggactacaggcacacaccaccatgcatgcttaatgtttgtattttttgtagagatgggcttttaccatgttgttgaggcttgttttgaactcctagacttaagttattcactgccttggcttcccaaagtgcagggattacaggtgtgagccacctctcctgccggtttcatgctttttataataagaatgaactccttatgtaataataaataaataaatgaaattatttgctttggatgtaacaaatgtagatttagattgtccagagtcaggagctaagcctcatattttttttgttttagctcagtgtagagtgcattgaaggtgtcctaaaaataattccatatagtaagccaattttaaaccctgctcacagccaggtctgccaagtatgagccaggtaaaattaccaaaatgggtggttctgactgactccttaacaataacgtggcttacaaacaaagactgatatgaaatagttgatccaacccaaacagtttgctcattttccaaaattttctatacaaacatatgcaacttaccacaacatagagatcataatgaaaggtttcccttttattcctttaaatgaccatatgtttagatctgatgtactgacagcaataattctccattaagcagaaacctaataaaatttgaaaaatagtgattttatctttagatgatactcagatcttctgctacatatgtggaaaatggaattattgctagaaacattgtttaaagattagggtatgcaaggagtattaggaagtcaggaggttctttctttaggaaacagcttatctggattcattcaaagagctttaggcgagtttgaggtctttctgcaaaatgtaaattgctatctgagaaaccatatatagtccaatgatgaaagaatgcaaagccttagaagcacaggagacaattccagtatcttccctaaagttctgacaaaaaggaaaataactatcaaattcttcaactcgaatgcttattatgtatgtataagtcaatcggcagatgaagagaggctggaaatatgacttctacccctagggaactcacagtcttgtgggggccactaggggtggtggtgtgacctgcctggagcagcgctaagtatggacttgtgagtcaagggctatcaaaacctaagtaaactgattgctgttcagagaaggtagagttccattccacagtttgcaagaaggactgttttatggaggaggtcatgttggactagaccttaaaaagttggtagaatttaaaagcaaggatatggaagcaggaagagtgaaagtgagcagaggtacagaagtgaggcaagggtgagcagttttaattttttaatggtggtataaaatacacatcaatatttgccatattattattattattttggagacagtgtctggctctgttgcccaggctggagtgcagtagctcaatcatggctttctgtatcctccacctcctgggctcaagcaatccttgtacatcatcctcctgagtagctgggaccacaaacatataccaccatgcccagctaatttttatatttttgggagtgacaaggtcttcctatgttgcccaggctggtctcgaactgctggactcaaatgatcctcctgccttagccccaaagtgctgggactacaggtatgagccactgcacctgaccccatcttaaaaatttttaagtgcacagttgagaagtacatttgcactgtgcaaccatccgcggcaaccatcttcagagagtatttttcatcgtgtaacagggaaaattcatatccatgaaacattaactcctcattcttcctcctccccaccccaggtaaccactattccagtgtctctatgattttgactgctctagggacttatataaatgagatcatacactgtgtatctttttgtgactggcttatttcacttagcataatgtcctcaaggttcatccatgttgtaacatatgtgagaattttttccttttgaaggctgaataatatttcgttgtacggatggaccaaattttgtttatccattcatctatccatggacacttggtttgccttcacattttggctattgtaaataatgctgctataaacatggaggtaccaatatctgtttgggtctctgctttcaattattttgggtttatacccaggagtggaatggccaagtcatacagtacctgtagttttagttttctgaggaaccaccataatgtttttcacagtggctgcaccatcttaattcttatgaatagtgcacaggggttccaatttttccacagtctccttaacacttactattttctggggcttttgctttgtacttgagagtagccatttaaattggcataaggtataatttcattgtggtttacattttcatttccttaatgattagtgatactgatcaatattttctatgcttgctggccatttgtacatcttctttggagaaatgtttattcaggtcatctgcctatttttttaaattgggttgaatttttttttgctgttgtttaggtagagaaggcaatctttgaataccagtgatgtttcactaatactgggccattgatttcacaagaagttgtatgaggtactagaatgtgtgtttggtttcaatcatggctggggttgaatgccttttccaaaattcagtgtgaatttcaccagaagccacaaagggtccaggagcaagaacatggtgtgactgctctctgctaaagaatttcagcctgatgacagtgagcaggctacacatgagactgacacaagaataggtggagagggagactttccactggaagaaggtgattctaacatgcagaatcaccttcaaggagcaagtaagcagaaaaatagacaatggcacagtggccaggcaagaagacactaggtccagaatctgaggttcaaatcctagctctgtgagataaaaacatgccttggttttcccatgctactgaaacaccaggggttgggtctaggtccctttgctcactgcacagaaagccaaccactgagacaatgagcattgccagggaagaaggctttatttgggtgctgcagccaaggaggtgggagatcagtcttaaattcatctctccagccgactcaaattggagggtttatatagctgggaagggaggtagctacctgcagggaaaacagcaattaaggaggggtaaggaagcaatcatgataaatgaggggtctggtgtctcattgtctgatggtgatttggtgaatttcagtctcttgcctgaaggtctgtttcctaactcagatgactgacaaatgttaagtttcaagttttaagaccagatgggtcaatttctatgtttattcaaaaaccctgtaaatatcagttctatgtggaacttgagctggtttcccccaagtcatcacagttagggttaaatgatgcaatataagtaaaacaccagcagtttctgacacacacacagagtgcatgacacaagtggtgtgttgggacaatatagctcagtgaactccctttgtctactcagttatattgagtgatgaggcatctctgaagatgccactttgctacttctcccctgataatttcaccagatccagccatatgagcactgcaagtggggacttagcttaaatcattcctcgtatttcctgtgcaggcaaatcatttggcaccaaaacatgcacagaagtccaaatcctgctgccagctccacgactgatgacacagacagacttcaggattagtcctttaatctctgtcctctattaaatgaaggtcatcatgctgctgcctaatgtaaaaggattgtggggattttcatcattcattaccgattatcttattctttgaaaccccaagaaaactatacaaattccaaagtctaataggtacacaagggctttattatggatgatgaagtttcaaaggatgctaaaccaaaaaaaaattgtttttctttttttttttggatttatttttttatttatttattttattatactttaagttttagggtacatgtgcacattgtgcaggttagttacatatgtatacatgtgccatgctggtgcgctgcacccactaactcgtcatctagcattaggtatatctcctaatgctatccctcccccctccccctaccccacaacagtccccagagtgtgatattccccttcctgtgtccatgtgatctctttgttcaattcccacctatgagtgagagtatgtggtgtttggttttttgttcttgtgatagtttactgagaatgatgatttccaatttcatccatgtccctacaaaggacatgaactcatcattttttatggctgcatagtattccatggtgtatatgtgccacattttcttaatccagtctatcattgttggacatttgggttggttccaagtctttgctattgtgaatagtgccgcaataaacatacctgtgcatgtgtctttatagcagcatgatttatagtcctttgggtatatacccagtaatgggatggctgggtcaaatggtatttctacttctagatccctgaggaatcgccacactgactttcacaatggttgaactagtttacagtcccaccaacagtgtaaaagtcttcctatttctccacatcctctcctgcacctgttgtttcctgactttttaatgattgccattctaactggtgtaagatggtatcttattgtggttttgatttgcatttctctgatggccagtgatgatgagcattttttcatgtgttttttggctgcataaatgtctgcttttgagaagtgtctgttcatgtccttcgcccactttttgatggggttgtttgtttttttcttgtaaatttgtttgagttcattgtagattctggatatcagccctttgtcagatgagtaggttgtgaaaattttctcccactttgtaggttgcctgttcactctgatggtagtttcttttgctgtgcagaagctctttagtttaattagatcccatttgtcaattttgtcttttgctgccattgcttttggtgttttatacatgaagtccttgcccatgcctatgtcctgaatggtaatgcctaggttttcttctagggtttttatagttttaggtctaacatgtaagtctttaatccatcttgaattgatttttgtataaagtgtaaggaagggatccagtttcagctttctacatatggctagccagttttcccagcaccatttattaaatagggaatcctttccccattgcttgtttttctcaggtttgtcaaagatcagatagttgtagataagcagcgttatttctgagggctctgttctgttccattgatctatatctctgttttggtaccagtaccatgctgttttggttactgtagccttgtagtatagtttgaagtcaggtagtgtgatgcctccagctttgttcttttggcttaggattgacttggcgatgtgggctcttttttggttccatatgaactttaaagtagttttttccaattctgtgaagaaagtcattggtagcttgattggaatggcattgaatctataaattaccttgggcagtatggccattttcacgatattgattcttcctacccatgagcgtggaatattcttccatttgtttgtatcctcttttatttccccaagcagtggtttgtagttctccttgaagaggtccttcacatcccttgtaagttggattcctaggtattttattctctttgaagcaattgtgaatgggatttcactcatgatttggctctctgtttgtctgttgttggtgtataagaatgcttgtgatttttgtacattgattttgaatcctgagactttgctgaagttgcttatcagcttaaggagattttgggctgagacaatggggttttctagagatacaatcatgtcgtctgcaaacagggacaatttgaattcctcttttcctaattgaataccctttatttccttctcctgcctaattgccctggccagaacttccaacactatgttgaataggagtggtgagagagggcatccctgtcttgtgccagttttcaaagggaatgcttccagtttttgcccattcagtatgatattggctgtgggtttctcatagatagctcttattattttgagatatgtcccatcaatacctaatttatggagattttttagcatgaagggctgttgaattttgtcaaaggctttttctgcatctattgagataatcatgtggttcttgtctttggttctgtttatatgctggattacatttattgatttgcatatattgaaccagccttgtatcccagggatgaagcccacttgatcatggtggataagctttttgatgtgctgctggatttggtttgccagtattttattgaggatttttgcatcaatgttgatcaaggatattggtctaaaattctcttttttggttgtgtctctgcccggctttggtatcagaatgatgctggccttataaaatgagttagggaggagtctctctttttctattgattggaatagtttcagaaggaatggtaccagttcctccttgtacctctggtagaattcagctgtgaatccatctggtcctggactctttttggttggtaaactattgattattgccacaatttcagctcctgttattggtctattcagagattcaacttcttcctggtttagtcttgggagagtgtatgtgtcaaggaatttatccatttcttctagattttctagtttatttgcgtagaggtgtttgtagtattgtctgatggtagtttgtatttctgtgggatcggtggtgatatcccctttatcattttttattgtgtctatttgattcttctctcttttttctttattagtcttgctaggagtctatcaattttgttgatcctttcaaaaaaccagctcctggattcattgattttttgaagggttttttgtgtctctatttccttcagttctgctctgattttagttatttcttgccttctgctagcttttgaatgtgtttgctcttgcctttctagttcttttaattgtgatgttagggtgtcaattttggatctttcttgctttctcttgtgggcatttagtgctataaatttccctccacacactgctttgaatgcatcccagagattctggtatgttgtgtcttcattctcattggtttcaaagaacatctttatttctgccttcatttcgttatgtacccagtagtcattcaggagcaggttgttcagtttccatgtagttgagcggttttgagtgagattcttaatcctgagttctagtttgattgcactgtggtctgagagatagtttgttataatttctgttcttttacatttgctgaggagagctttacttccaagtatgtggtcaattttgtaataggtgtggtgtggtgctgaaaaaaatgtatattctgttgatttggggtggagagttctgtagatgtctattaggtccacttggtgcagagctgagttcaattcctggcttgattaggtaaataaagcagccaggaagctcgaactgggtggagcccaccacagctcaaggaggcctgcctgcctctgtaggctccacttctgggggcagggcacagacaaacaaaaagacagcagtaacctctgcagacttaaatgtccctgtctgacagctttgaagagagcattggttctcccagcacgcagctggtgatctgagaaccggcagactgcctcctcaagtgggtccctgacccctgacccccgagccgcctaactgggaggtgccccacagcaggggcacactgacacctcacacggcagggtattccaacagacctgcagctgagggtcctgtctgttagaaggaaaactaacaaacagaaaggacatccacactgaaaacccatctgtacatcagtatcatcaaagatcaaaagtagataaaaccacaaagatggggaaaaaacaaaacagaaaaactggaaactctaaaacacagagcgcctctcctcctccaaaggaacgcagttcctcaccagcaacggaacaaagctggatggagaatgactttgacgagctgagagaagaaggcttcagacgatcaaattactctgagctacgggaggacgttcaaaccaaaggcaaagaagttgaaaactttgaaaaaaatttagaagaatgtataactagaataaccaatacagagaagtgcttaaaggagctgatggagctgaaaaccaaggctcgagaactacatgaagaatgcagaagcctcaggagccaatgcgatcaactggaagaaagggtatcagcaatggaagatgaaatgaatgaaatgaagtgagaagggaagtttagagaaaaaagaataaaaagaaatgagcaaagcctccaagaaatatgggactatgtgaaaagaccaaatctacgtctgattggtgtacctgaaagtgacggggagaatggaaccaagttggaaaacactctgcaggatattatccaggagaactcccccaatctagcaaggcaggccaaagttcagattcaggaaatacagagaacgccacaaagatactcctcgagaagagcaactccaagacacataattgtcagattcaccaaagttgaaatgaaggaaaaaatgttaagggcagccagagagaaaggtcgggttaccctcaaagggaagcccatcagactaacagcggatctcttggcagaaaccctacaagccagaagagagtgggggccaatattcaacattcttaaagaaaagaattttcaacccagaatttcatatccagcccaactaagcttcataagtgaaggagaaataaaatacttaagagacaagcaaatactgagagattttgtcaccaccaggcctgccctaaaagacctcctgaaggaagcgctaaacatggaaaggaacaactggtaccagccactgcaaaatcatgccaaaatgtaaagaccatcgagactaggaagaaactgcatcaactaacgagctaaccagctaacatcataatgacaggatcaaattcacatataacaatattaactttaaatgtaaatagactaaattctccaattaaaagacacagactggcaaattggataaagagtcaagacccatcagtgtgctgtattcaggaaacccatctcacgtgcagagacacacataggctcaaaataaaaggatggaggaagatctaccaaggaaatggaaaacaaaaaaaggcaggggttgcaatcctagtctctgataaaacagactttaaaccaacaaagatcaaaagagacaaagaaggccattacataatggtaaagggatcaattcaacaagaagagctaactatcctaaatatatatgcacccagtacaggagcacccagattcataaagcaagtcctgagtgacctacaaagagacttagactcccacacattaataatgggagactttaacaccccactgtcaacattagacagatcaacgagacagaaagtcaacaaggactataactttttataagatacatatgggtttactactaaatattcttaaaatgaatataatgctataatattcttattttgaggtaatatatatatatagtctgcaaaaattaggtttcctggtgtcattaaccacttatgcaattatttttctgaaatgaatacacatgctgtacatgcagttttgcctgatataagttttaaaacaacgtatattggaatcttggaactaaaaatgagaaaatcagtgtccccttgatgtcagtttcagtttcaactgcacttgctattttatttttaattggttacttacattatctgtacattgtcacagttgatggtatttgttttcttctctgtgaccatagtttgcacagatttaaccataatgcatccttaaagattacaagaaatcttttagacacagctcctctcagttgctgaggatcgaacctttacttatgtgttttcttcatgaatatatatttcctgtgttgtatgtttgtacatagctatttgtagcctttgaagtttatggaagtttttttggttgcattcttggggtatattttctttccctgatgactgttaaggttaggatatttgacccttccaaagctcatgttgaaatttagtccccaatattggaggctgggcctaatacaaggtgtttgggtcatggggacagatccctcccattgaatagattaatgtcctctcctgatggtgaatgaattcttcctctattagttcctgcaagacctggttgttaaaagagcgggccacctccccggtttctctcttgcttcctctctcatgtaatctctgcacatgctggcttcccctcctctactgccatgaatgggagcagactgtggccatcaccagatgaagatgcccaattttgaactttccagacaccagaatcataagccaaatcatcccttttcctttataaattatccagcctcaggtattctttatagcaacacaaaagggacaggactttttatatcttgccccactgtcttctagcatttcatgtgtcccataaagaaatcttagtctcctaggttttttttttttctgaatatccacagaattctttccataacttcaaataccaggaatttattggggtatttgttaattattcaatataaacacagccttgtaattcttgggctatttctgtctgcagattcaaatttcactgtatttcaggaatttcaccttgaattgtatctttgaaaatttgttttcatgttccattcattttttaacccatgcaaggcatttagtgttatagatatttgatctcttccctaccactccctcccatccccctctttttctctatctctgtcttccgtcttttacttttcgttcttttccatctcacatgctcattttttcttctcaaaaccatccttcgaattccttcagtggtgtctcatctcccttttgctgcttctatcatgacctttgattttggtctctttttgtctctctctctctgagattctgaggctctgcctattccgtttttattctcatttgtttctaatttgtttccaagactctgtctactcccttttcattctcatttattactaatttatttctgaggctttacccactcacttttcattcccgtctaacctaatgtattatcagttcttccttaaagccttatattgcttctttaaattctcatttcagagaaacaatagtgtctttaattgattccttagaaataactttgttcatggtttttggctgcgttgtggtatataatctttccatttctcatctttgtaaatcatgttctgttcttttttatttcagcatcattttaaaggccccccactggctccaccctttttaagtagcattgttcctcatctttttggactagaattttgggcaaagctctggggaaaggggaagaagaaagtgccaaacaaacgggaagattgggtttcagtctgttatctctaggatgtttctcagctggacttggcctgtgggttatctggtccagcatagcaggatatcttccgggctcacaaggaggctgtgcattttacagaacattttaatgtgattatttcaccttgacttatcttcaccagacagctttgggcaaagacggccaggtagcttatatcttattgactcttccttctatcctataccatgattgaaacatgatgtaggcttccaaaaccaggccatgaaccttgatcttaactttctaagcatgggatagacacatttcctttcaatgtgtgccacccatccactttggataactatgagctgggtccactctgcctgagtcacacatagaaagacaccttctcttggagttcccaaatacctccatccacttctcatacacttggttatcttcctgcatctactgttatccagtgttataggggatctgtagcttcattcaagataacatttgtttgtttcttcttctcttgtttgctttggattggtttcataaaggaaatgagacaaaaatatatttatactaccatttgaaaagaaaagataaattccttctttcaaattcattcctttttctttctttccagtgaatctcatggggtgaggggagcactgaagggaatgtccaatctactcaagtccaaaaagtcacaggtataaggcacagaaaattttaccagtctaatgatggcagttttaatgctatataaggacagactatacaaaaatgctattaatgaggatgaggagctacaggaacaaacctgatgaggaactgtaattctattagagggatgtatatagccatcatttttttctttaatccaaaacaattagattgcttatatacacagccacattcaattctaaggtatttgattgaaatgcaccagaagatgcagatatatatatatacttttaccttagcttccattttattctttccctcccattttatcagtgctatagagtacatttttcccacttgagctcaacatgctgttgtgcagaaagccttctcttgggagttcccaaaatgttggcccagatgagtgcagcagacatttggcccaggtgagcctagcagatatttacatgaaatattagggagcatccatctgggccatgtgacttaggctggcgatacacgacagaggattccaatttgttgtataaatcacccttagagcccccaacagtgaacacatagggggttcttttcattttcatgatgtttaatataatctttaaaaataattaaaattaggtgaagtgtgtagatttctgagagattacagaaaggcattagttttgatacctcttgcttgtagcatttgaccgacataaacaaactaaaaggtttaaaaagaacagggattcttcccagtggtatagggcaatgggtagggaaaaaaagttcaaaattgataaatagaccaatattattctcaaaactcataccattgtgattgggaagaaatgaatacatattacttagtcacatcatgttaccatatacttatattaacacaacaaaaaggaaattatacgaaaaaaagtcatacatttaaaggatggaagaaaatcctaggtttactcagagctcaagatcccattgggatgaatattgttctttcctcggattgtgccttcatttcattcattcacttatgtatgtatttatttatttagagatgggatctatttctgtatttatttatttattgattgattgatggagtattgctctgttgcccaggctggagtatagtggcacaatcatagctcactgcagccttgaactcctgggcttaagtgatgctcctgcatcagcctcctgagtagctgggactgcaggtgtttgccaccatgccccgctaatttttaagtttttttttgtattgattgggtttccctatgtttcccatgctggcctttaacttttcagctcagcgatcttctgccctggcctcccaaagtgctgggattacaggtgtgtcccttcatttctaatgaaggaaggttttcctttgaatatctcacaacagatatttttaaaagaaaggcagatttgagcaaccatcaacaaggtttacttgaaaattaatctgatatttacaagtgcattatataacagaaatgttacagactgaattgtgccacacctaccccaaaactcttatgttgaaatcctaacacccagtacctggaatgtgattgtatttggagatgggtcattaaggagtaaattaaagtaaaatgaggtcacatgggtgggccctaatccaataggactggtgtccttataagaagaggagatgaggacacagatacacgcagagagatgaccctgtgaggatacagggagaagacaccatctacaagcccaggagagaggcctcaggaggcaccatccctgctgacaccttgatctcagacctctagcttctagaactgtaagaacaattgttgctgtttaagcattcccatatgtgggactttgttatggctgcctgagcagcctaatgggagtgcaaagactttctttaaataatgtataacaatgttggtttggaaatgactatccagtgttgagttcaaaactttatctttatgggtgctgctatgagtgagtgtctaatttgggggataatattgacattcttcgggagaaatgcagactccaatcagtgcagaaaatggcacagaataatgtttaaatatgccctccaggccataacatggttgggttaggaggaggaatattaaccattcccatcctaaaacacagaattttgggtttctttctgtgagttcaccacctctgaccttcacaggtaagggaccatcacacagacatctgccattttcatataactctctatccaaacaaaggctgaaaattcagcatggagaaactctcccagcacccgtggtcatccccttgacctgcatccccaccctgggcactggtgtgggggtgggattctttatgaacttgggccccaattctgctttccctggaaagctggacccacacaacatcaccctcatatgcagaccctcatgtgtgggcacctgtgaatacccagagctgggggtctgctctaggagctggttcaggacaggatactcccatccaatctgtgcccaccatagaaaagagccagccaagtgcctgctactacagggctcttcacacatggaaaagctgccctgtggaagtgtcccaggaaagggcagggggacaaaaaaaggtcgcagtgatttgcctccagacactggacactcttccctggagagtacagggcatgctgctctccaaacctgatcttgctacatttgtgctgcccacagtagtggtgccactgagttttcaaagaagacagcaggccctgaattgtgcaaggaaaataagtgcttgaattttgtagcatgcatgcagtgttctacttttaagaatggtaccaggctcctctgatattcaagaaaggcccccaacagctcagatggtagttttctaatcctgtcttcccatatgcacatttacctcctccacccaagaactgaataacagacatgagtgctcaggacgtcatgctgtctactgtcatccccttcctgagaccccctctccaaatctcttgacaaccctcttcttagctccctctttctttctggcctgttacactcaacctctccagcatcctaacaagtacccactcaaacctatttcctcccctgctgtgctgcttcttcaaaagtgctttgcttctcatcctcaccttctttccttgccctcttccctgcttccctcttcaaagcacttctcagctacaaatgagaaggaagcgatctgattaaacaggtgatgagcagagtcacattctgaggggatttgcatttttaaaaggagattaatgaccacatctgaaaatgccaccctggaatcttatgcagagtgacaggggattggggatgagctccattcagggcaggaagtgagagtttggatctgaagtgcttttcagatgctgaagtcataggaggttgcagttgcttcctgggtggagccataaacaaacatctcttctgctgagtgaagtctgagaagatagaggcaatggtgacccaggagctctggaattatctggctgtgttacacttgcaggactacacacatttaagtgtaaaaagcatgctttttgtccacttggctgacctcttagcctgctctcctcttattgttcccttgaaggcatcattttttaaagagaaatttaaactccgtccatctcatcccctttggaagaaagttaagattcctttctgagctctttcatcatctggagtttaaaagcttcccctcctctgtcaactctctttgaatccctcatgtcacaccaaacttcaaaagagacaaataattttgcatgactccctgcaggctccattttgccctgtagtgacagccccatgtcttgactttcctgattggaaaaacttctcaagctttctacattcatgatctctgcttcttcagtgcaaccttctccagtttgtccctgatgtccaatggtccctgcattaatcctgtccaagccacaggtgaccctcatatcatctcagcttctacttcccattcctctctctctctttttttttttctgagacaggggtgtcactctgttgcccaggttgatctcaaactgttgagctctaaagatcctccggcctcatcttcctgagtagctggtaggggtgtgagcccttctgcttggtctccagtcctttgcttttcttttttgacctatacaacatttggtagttgatgtccatgttcatgtaattgtcttctctggcttcttggggccacagtgcattgccttctccctcttttcatttattatcttttcatctagtaagacccatcatcccctaaagatgtatattttcttcaaagcaaggattggcgtaccttcacaaactgagtctccaatgacaacataaactgaaatgcaatataaatcatggacagatgtgagctcatcttctgcttcctgtgtcctccgctggttcttcttaccaacatcatgtattgttaaataagcgagtgatattaagttagagaatggactgagtccattaattcatttggcacgctccaaagtcctcacctgagatctatctactctccaaattacacttgttagaaatacaggaggggccgggcgcggtggctcacgcctgtaatcccagcactttgggaggccgaggcgggcggatcacgaggtcaggagatcgagaccatcccggctaaaacggtgaaaccccgtctctactaaaaatacaaaaaattagccgggcgtagtggcgggcgcctgtagtcccagctacttgggaggctgaggcaggagaatggcgtgaacccgggaggcggagcttgcagtgagccgagatcccgccactgcactccagcctgggcgacagagcgagactccgtctcaaaaaaaaaaaaaaaaaaaaaaaaagaaatacaggaggatccttttcacatgagctaattagggtgaatacatgtaagtgttggtaagaagtactagaaacactggaatttgtgagatttcactgaagaaccagcttccacccagtccttcacattgttctcttttggtagtttcttgtcatttcctccttttattatcaatagagctgctgtgaacatgcatgtacaagtttctgggtggacatatgttttcatttttattggggggggtagacatcaaagaatagaattgctgtgttgtatgatgagtctgtgttctaacatttcagaagctggacttcaactgcttcctgatttcaccttccacaccatttctgtagtgaggcccactccttggccttataagacctgaattaagttaggtgcccagagccgttctgtcatcgactctgttctttcccttgctagcctgtgtaataattggcaatcagacctttacatgagcaatggtttcatatgtctccccaactatattacaagttccacaggggcagggctatgtctatctccttgacctctgtatctgcgatgcctggcagagggctatgaacactggttacgctccataaacactgggagacaaagaagggtgtcagtagagttagtttttttgcttttttacccccagaactcttagaaaataatttgagctattccttcaaggaagtcctggggcaggtgatcattcatagatgacatgagggagtgcacagcacatgagtttgcaggaaaatgcaaaccccacgttgaaatttgatccccaatgttggagatgaggatttacaggggggtgtttgggtcatgggggcggatccctcacgaatggcttggtgctgccctcatggtaatgagtgcgttctcttttcagtcctgcaagagctgattgttagaaagagcctggcaccttcctctcctctttctcttgcttcttctctcaccatgtcatctgtgcacacagcagctccacttcccattccaccatgagtggaagctccctgaggcctcaccagaagcatatgctggtgcaatgcttcttgtatagcctgcagaactgtgagccaaataaacctcttttctttataaattatccagcctcactcaggtattcctttatagcaatgcaaaactgactgagacagggtatcaggagacctagctttgcctgaatctgagaacttcatcaggacttttggaacaatttagcccacaggtccaaggctgatttttgtcacagtgaagttcaggtagtaagaattctcactggtggctgttgaggatggtggtggtggggatgggtcatatggagaattagcagtgggagactagaaattaaagtggagaaagggaagaattaaaagtcaaaaacagtgtgagggaggaaagcaatggatataacacctcaaatctttatccttgagaggccttaaaaaatctacttaataataatcagatgctattctataagtactttgagactagacatgtgatgacttttaggaacctgtactgtggctgaaaatgcatgcaaatctagttgactcagatccagtcttaactggctcataacttgcttcatatgcatgactgtacgttagcaaggaaatgagagagaataacagcacatcacataggcatgaaaagtatttgcaaagcagcagttctcaaaaatgacattttgcagtgttttccagaagcagattcagaaaactgaagaccaaagtaatgatggagccgtctcatgcctagatgagcagaagcataccaaaggcttagtatttccccaagtagtaggcacctcaaacttatttaaggaaaatactcttcttgatgaaacagatactgcagtcgaagcaggaatgtgtttggtgtgctgccttaaatagcatgggtagatgttcaaacatgttaggactcgctggccctaggaaagacccgcaagtagatactttccacaccaggaaagtgacaatgaaacaccaaacaccttttctcctctaattaccaaggaaaatatttctttcccaatggtggaagacaataatgttgggaatgatgaagttttctggagtgtgaagtggatatgtcttataagtttaatccacagattcaccacttcataagtggataatcgaattgtgcctcagtttcctcagacttggggatattaagagaaccctcagtcaccacaaggtgggtaccagcataagaaaagagtgtagcaaaagcccaggggtgcatgttcttaaagtgcctagtgtgggattagaatgacaagtggtagatgacctacttgtgcagaaatttagagttattttgtgattttcaaatgatcatgggtgctttccatatgctgtccagactaggggtgctgcagctagaaagggaagaaggtttccatatttcctgagattggagtcacatcctctcaccaatgcactcacctgctgactaaccagtgtacttctgggaattgcaaatgcatgaaatggcacccattctagactagtcgcggcagtgttggtgatggccacagaccaggaacgaccttgacgtttatccgtagggaactgggtcatgagccatgatccacatcatggatactgtgcagctgtggcaatgaatgaggtatccttctgtctgtgcaccgggaaaggtttccaagatacactgcacagtgagaaaaacaagaagcagaacaatgcacggtgtgctacctcttgcattacaaaggaggaaatgtaaaattaatttacaaatggccaataaacacatgaaaagatgctcaacatcactaatcattaggaaaataaaaatcacaactacagtgggataccaccttacatcctttacgatggttgttcccaataaaaaaaaaaaaaggaaaacagaaaagaaaagtgttggcgaggaggaattggaatgcttgtgtagtgtttgtgggtttgtaatatggcacaacaactgtggtcatttctcaaaaaattaatcatagacttaccacaagatgcagcaattcggcttctggtgtattccaaaaagaacggaaagcaggggccccagcagatatttgcatgtctttgttcatagcagcattattcacaatagctaaaagttggaaacaagcccagtgtccatccatccatgaatgaataaacaaaaagtggtctatgcgtacaaacaaatgggattcagctgtaacaagaagggtgattctgatgtgtgcttcaacatgattaagccttgagttctttctgctaagtgaaataatcagactcaaaaagacaactactacatgattccacttaacagaggtgcgtaacgtcatgaaatgcataggcagaaaatgaaaaggtggttgtcagcggctggagggagggggaaagaggagttggtgtttaatgggtacagaattccagttggggaatatgaaaaagttctgggtggggatggacagtggtggtggttgaacaacaacctaaatgtacttcctgccactggatgtacacttaaaagtggttaaaatgggccgagcgaggtggcttgcgtctaatcccagcactttgggaggtcgaggtgggcagatcatgaggtcaggagattgagaccatcctggctaacatgatgaaatctccgctctactaaaaatacaaaaaattagctgggcatggtggcatgcacctgtagtcccagctactcaggaggctgaagcaggagaagtggttgaacccgggaggtgaagtttgcagtgagctgagatcatgccattgcattccagcctgggtgacagaagaggaacccttctcaaaaaaaaaaaaaaaaaagacagaaaaaaaagaaaggaaaaaaatggttaaaatggtgaattctatgttatatatatttcacaataatttacaataattcctattgttttgcataaaacagctgtagaaagctttgcaggtcatgaacagcacagctggccactggggctggcgtggggctaggacctgggtgcatagggaacagggatgagacacaggctcttcatgcctgcacacatatacagatacacacagatggaaattactgagccatctaaatacaacacctattcaaaaaatcaaacagaaaaaggaaatgtaatggggctgaaggatgagggtaggtggggtggctgctcaggaggactgtggaggccacatcgcctaaccttcgaggcctctcttagcagctggagtgcatcccggggacttgggagctctggaaagaggagcaggaaagggccatggccggaggaggcctgaaaaagatcatctctgccacagagaagaagctggctcggatgctgctggcccctatggagacagggagacccggggagacaactgtattcattcaaggaggaatgggtggtgatgcaaacttgggtggaggccacagggtgcagaagacaggacacagcagagagagatgtaggacatggaagggacagaaaggagtgaccacaggacataaaggggcaaggaaagtggaagcatgataacatctgctgggcatccggctgaggggttgggtgcctagggtgcccttccctaagggagaaccccaggagcagattcagagaaaaccgcccagctcactccagcaagaatcagaaaaggaccggttaaaggagagggtaggaaggtcaccaagctccaagggccctcatgaatccggcttggaggccacagggcccagggcaaggacaaaccacaggcacaggacagctccggtcaagatcttctggctactgcaggaggcagaaaccacaccctgcaccctgcactgctgaggctggcgctggagtccagaagcttctacaccagaagcttcggtcccccatccctgctcaaaaaattaaaacaaaaacaataacaaatcggtgtcatgcaccctctgcttcctggtgctgttcgggaccctgagtctttcacgggagcacctgatggggaaagcctggacccgtgtcggtgtccctcctgcaaggagtgctgggaaaatgaactttccagcttcctccttgcgaaggcagaacattccccatgtgtactggtggcatttaaaaactgcagggcagccagagaacatggactgtgttccaccgggagagttcctggcgggatgtcccggtgcagaagcccgtcccaaggtgggtatttgagctgaggaactgagaagccggtttctgcctagagttagagatccgagaggcatcagcacatggaagggagggaatctacgatgcctcgagggtgggagatcagatgaaccaggagaggcagggcccgggaggaaccccggggagcagcctcctttaaagcctgggggaagtagcttcagagaaggtggggtaggttgggtgggggttgctggaaaaatataattaagaaacaaatttctgctcagcccagaaacccccctcacatccatagaagtaaaagaaacttgtcttatgattgagtaagcattaagccaaaatgtgatgcaatctgctaagagatgacaaagacagaaagaaatcccacctttgtatccagccaagcaggtgcaacccgttacacacatggtctccagatagatggtgactagttcccagttgagaggactcaacggcaccatttgtcacacgtagttcatcctaaattcacccagtaactgtgttgattctctgtgtggttaattggctttatccacaggaaaaagaaacctctcatctatgacaggaggtagttttgcaactgggagtgagatgcccccagaactgaggttccttccttctcacagaaactgggagacaggggtgctttctgcccggatgcctgcctttcaaagagaggtctcctatggccttgaggaggagaattctgggttgtgaggcaggcaagatacttatgtatgctttagaaagctttgcatacatcttcaagggatagagaaagagttttcaattacacctcttctaaaaaaaatgatctcaaagtccagcctaggcaacacagcaagatcctatctccacacacacaacaataataataaatttgctggacatggtggggtgtgcgtgtagtcccagctactcaggaggctaaggagggaggatcacctgagcccaggatgttaaggctgcagtaagcttagatggcagcactgcactccagcctgggtgacagagtgagactctgtcaatgaatgaatgaatgaataaatgaatgaatagaaaatgctctgagtgaaaagaggagagtctctttatctttttgcaacaggctaaacaaagtttttaaaaatgtatatttgcctcacagagattattccaggaaaagaagtggccctcagtgtcaaaggatgcaaaactaacctctgagttcctggcaggtttagcaataaaggaggatgttgctgatctcagtacaagcaatgttagagaaaggggaagatggaagtggacaaggacgagtgagtggaaggtgacaaatggaagcaaagaaacgtatccagaccattgaagatgcttgagcgagaagaaagaggcggtggagggaatggaagcccgaggaagtcatatgttgcaataaggggcctcagagcacgtgtagagtgtggagcagagcccttgcagaggggctgtggaaggctggcagggtgcaggtggccccactctccgtcaccctgaggagtgtgtggtcagagttaaagctcagtctgtttctgggatcaggtaagaggtgagcgtccggagaagacaggcggatcttcagatcctgcagacctccaccgtgccctctgtccctctcgactgctttttctccatctccattgtctggctcacattggtgtcactttttcatttctccctgcccgtcttttctcttttctcctctctttttcttaacccttgtacctttggaagtcccactaacagaatttaaacagcttttcaagttggttttttgttcccagaaattgattttagactctccatgaataatgtggaaatcaaatgagtataagctggttcatctctctgcaaataaacaaataaaatctacattccaatgtttcttcttccagagtagcccgcacttgattttttttttaattactgtcacttgcaatagatttttaattcctgtaacctggctacacaaataccatggggcaaaagccttacttcctgtgagaggaaaccaggcttgactagcctcatgctggctttgaagaagtaaaatcaggggttgatgaatttgcatagggtaaatatcaaaggtcaaaagtaaacaataggtggtagagggaataccccaaattataaaagaacaaactgtttaagccacaacagaattatcgtagaaataaaccacggtccttcctgctaaaatattccacttagaattgtaaaatattcttctcaataactcctggaagagcctactcataaattaatgaggctgggagcagtggctcacacctctaattccagcactttgggaggcctagacgggcagatcgcttgaggttaggagtttgagaccagcctggccaatatggtgaaaccccgtctctactaaaaatacaaaaattacccaggcatcgtggcaggcacctgtaatcccagctacttgggaggctgaggcaggagaatcgcttgaacccaggaggtggaggttgcagtgagccaagatggcaccactgcactccatcctggatgacagagtgaaactccatctcaaccaaaaaaaaaaaaaaaaagaaattaatgaatgtaagagcatctatgttccaaatgcagtgtattattttatgcaggctttcacaagctccaaaagattcaccgtgcagaactggacgttctagagaaagaccacgcctcctcctgcaggtaactcttcattcaggaagcagctcttggcttatccctgggcttagtggaattggaatacctgaccataggacaccaagggctttaggacctgagtggcacatcgtgtcctggtgacatctgagttacctggggcgtgcacagcagcctccagcatcccagggagagctgtgtatggggtcaggctcaagcaggtcccagggcaccagtgacccaatgggtgaatcagactcccgtggcacctgctccttctgtatctccctctgccatatatatgagctcatgggaagcactgtaacctcttacagaggaggaaagttcatggacttctagcttctagaactgtgatacaataaactcctgttgcttatctactcctctgcagtattttgtcatggcagccctagcaaactactacagggactgtgggggttaggatgacaccaagcatcaaatgccactccctgttccattattatgtaatgtccctctttgtcttttttaactgctgttgctttaaagttagtttttttgatataagaatagttactcctgctcacttttgtggccatttgcatggggtgtctttttctacccttttaccttaagttcatgtgacactttatggttaggggagtctcttgagggcagcagatacttgcttggtgaactattatcaattctgcaattctgtgtcttttaagtggagcatttaggccacttacattcaatgttagtattgagatgtgaggtactgttccattcatcctgctatttgttgcctgaataccttggttttattcatttatttattgtatttgtgttttatacgtcctgtgagattcatgctcaaagaggttctgttttgatgtgtatccaggacttgcttcaagatttggagctccttttagcagttattgtagtgctggcttggtagtggcaaattctctgagcatttgtttgtctgaaaaagactgttatctttcctttatttatgaactttagttttgctggatacaaaattcttggctgataattttttttttttttttctgagatggagtcttgttccgtcacccaggctggagtgcagtggtgcgatctgggctcattgcaaccttcgcctcctggattcacgccattctcctgcctcagcctcccgagtagctgggactacaggcgcctgccaccaggcccggctaattttttttgtatttttagtagagacagggtttcaccatgttagccaggatggtcttgatctcctgaccttgtgatccacccgtcttggcctcccaaagtgctgggactacaagtgtgagccaccgtgcctggcctgataatttttttttaaggaggctgcaggtgggtatgcatgctcatttgaggtgttcttcccttattgaagattactaaaatcacatgtgttgaaaagcatttggtattatttacttaattgatgagtacccatttatttttacattaatttgataccatgtataaacaatatataaacataggtatggacatatacatatgtgatatgtgatacagcatagaacatatacttgtgcacataaagatagagggagacagaaatacttcagatttttgattttaaaactttatgcatgaacacataaaactcactgttaaaaaaaatagctggatttaagttgtgcttttgtaaatagaaaaagttaacatttatctgaggaagcccttgctgagttttagagaaagtaggtagtaaatttacatctcaaagcacacacaaacacacacacacacacacacacacacacagagagaaggagtttgggtgtgttcaaggaagattaaaagtagatgccaaggtaacacaaaaatgatagaaatttataacaggattttataaggagaccaattttatttccatacatagcttttattttggtctctgttttccaactttactccaggaaacacactacacaggctcccttcttaagtgctggtgggccactgcacatgcagacagcccactttaagggaagaatcaggggagaagagatgcagaccccagaattatgccaacatacaaaagcctaagtcaaaggtcaaaccacacacttgaaatctcatcacctgtttggccctgttttaagtgtgctttactttctttaatttctgctctaaagcttttaaataaactttcactcctgctctaaaatttgcctaagtctcttcttctgccttatgacacttagttgaattctttcttctgaagaagcaagaattgaggctgctacagacttgtacagatttgctgccattaatatagtttagtgccattctacatgatagaatatatatattcttatatttatatatatatatatatataaaatttatgtattcatagaggccttgaatctacattcttgctgcactttatgtaaacaatccaggtataagactaaaacttattttggaaatatattggtcccatatgatttctatttcataaaaatgggagacaggagggggaaaattatttttcagaaggaaacaacagaaaaatggttattacattttagatctgttcattttttttaaattttgttatttacctacaatttggactgaatcctaaattttttcctggctacaaatttcaaaactaatggtttcagaattttcttccatttttcttccattttggtatattataaattaaaactgtgctttttaaatttttatctttttttaattacacttttaagttctgggatacatgtgcagaacctgcaggtttgttacataggtatacatgtgtcatggtgttttgctgcacccattaacccatcatctaccttaggtatttctcctaatgctatccctcccctagtcccccacccctcaacaggccccagtgtgtgatattcccctccctgtgtccatgtgttctcattgttcaactcccacttttgagtgagaacatgcggtgtttggttttctgttcctgtgttagtttgctgagaatggtggtttccagcttcatccatgtccctgcaaagatatgaactcatccctttttatgcctgtattgaattccatggtgtatatgtaccacattttctttatccagtctatcattgataggcatttgggttggttccaagtctttgctattgtgaatagtgccacaataaacatatgtgtgcatgtgtctttatggtagaatgatctataatcctttgggtatatacccagtaatgggattactgggtcaaatgatatttcttgttctagatccttgaggaatcgccacactgtctttcacaatggttgaactaatttacactcccacgaacggtgtaaaagcattcctatttctccacatcctctctagcatctgttgtttcctgaccttataatgatcaccattctaactggcatgagatggtatctcactgtggttttgatttgcatttctctaatgaccaatgatgatgagctttttttcctatgtttgttgctcacataaatgtcttattttgagaagtatctgttcatctgcttcacccatttttgattggcttatttgttttttttcttgtatatttgtttaagtttcttgtagattctggatattagccttttgtcagatggatagattaaaacttgcaagctgaaactcgacgacttatgtaaacttctggataaatcatagcaacttatatataaacaacctttgtgcctgctgatgtgtggactacacaaaaggtacacatgaacactgtattcagactgcaattcagaaaaatgtgtcacattgccattgcaattggaagatgcttcagaaactctagaaaacctagtctatagggttagagtgatgtttgccaaacgaattgctctaattgaagcagctgttgtgtgactttaataaggttccaggattatactgtcccttttttgctgtgacttccctttgcccttttctgatttgtcttcatccccttttccatggggcatgacttcttaagaatgagccttcctagtgatgtaggatgagatgaaacatacagtcacaaagtcatgtcttctatgatgctttatctgaaagcttttgaagaattggggggccaggtgtgctggcagaggcctgtaatcccagcagtttgagactctaaggcaggaggatcacttgaaaccaggagtttaagaccagcctgagctacaaagggagaccacgtctctacaaaacataaaacaaatcaaattagccaggtgcagtggtgcatgcctatagtctcagatacttgggaggctaaggtgggaggactgcttcagcccaggagttcaaggctgcagtgagtacactccagtcttggtgacagagcaaggttgtgtctctaaaagaagaaaaaaaaaaaaaaaaaggaaaggaaaggaacggggtaaacaggaaagccaaagatctcgggcatctccagatgattccctgaacaaattgttttttcttggcttcaaaacctttcaagatgtatatttctttgtaaaagaaggacatgccaattgtaactttaagtgagcaatccaaatccagctcctaaaaccgaagtattttaactctcattctgataatatttattttctgaggcaaagaagaaagacaagattagatcaattgtttctctgcccactccatctcttccaacctgccttctcccctttaatcaaatgtataaatactaagcctcctgaaacctcttcagagaaaacacaaaccacagaggttttttgcaactcatgtattcccagggtgcactatcaggctctggctcaataaaactcaactggtcaagactcttgcctcagtcagtcattctggataaccaccaggagtcctgcaaagcccttcagtaatctattgcctgcctaggtgatgtgtacctagatgagtcatatcttcatgagccaaacacttgtcttccttttctgtctttcccaaccctaccactcagtgctgtgtgctctgatctgaccccagttcccaggttgtttgtataggtctaagaaagcaagaccaggaggggcaggttgagaaggaagtaagaggccaacagcagtggaaagtggcaggtagagctgtcattgctcaaagccacacacactgggtgcattgtatgaatttttctggattcaaaatcttttccctgtgtgtctatctagaaactcaccctcctcctactttcttctcattacattttctgtttctagtgcacttgtttatgtccagagaatggccatgcaaatagttgacaatagaataaacaatgacgttttgtgagacttggtagctggcctttgttttttccaaaagagattgaggtttctaaaagctagcttttatgcagggctgtgcagttgtgagtgtagttttatggaacaggtgcataagtgaagggtgagatagaaaacaaaatgctggctgtttgtcaaatcctgaaagtgaatgggacaaaaatcatttttgaagaaggatgtcattcaggagaccttgtaaatcttagagtgtcctcttatcagatgaagtggaggatgaggttgaattatggagttaggtgacagtgggtacatacttctctgcctcagttttttttttttttttaatctgtaaaaatggggattgtggtacttgggattttttggtgaggaccgtagttaactggaaagctctcaggatagtgcctggtacatagtgaatgctgcatcagtgtgagctattataattatgggaatagacaaaggtgccaccctggccatccagagtggggagatattttctggtcagagtccaggcaggccagctggagatgaagctgattagtggggacgcttaacttccaggagtggaagaatttaggaggagtaaacagaatgcacaacattctgtaaacattcctttacccaacagtaggaatactcagagtgggtgtgtcttccgtgacaatcattatctcctgggaatctaaaaatgtgtcctagagtcaaatggctttgatgtaagccaaacccagaaatgggcttcagggctgcctggcacatagcattcattcatcttgaaaaaggaaagcattcatcttgctaaaggaatccccttttctggcccaggccattatttttgttttagtactatcctaatttttaaggtataaggagaaagactgaagaataaaataataaagtacgtgtatgaaataacagggtagaattgagactggtacgtgtaagttaagagaaattgtgtataaattttgtgtgaacagaaaaaggatttcttgttgcaaacagacctctccatataaataatacctattgcctcgagtggatagcagaccgcatcacaagaacattccagcagagtcatgagagaatggttagtgtggcttctttaattggcaggttagactgagtaagttactgaagagaaaggagttgaaggagaagatgggtgcgggcaagaaaaatgggaaggtgaaaggaaaggactgaaaggaatgtttaccaagggctcatcaggtaccaggctctgtgactaatgtcttacacatgttaatttactcttccactgtcattttctgatgcagtaagagtcagccttacactgcagatgaggaaagaggctgagggaggtcaaatgagtggcacagggtcatccagccacttcatagcagagctagtgtgtttcactgtggtttgtgccgacagaaaagtgagacatggaaggaaggcaaaacatttttgttgtgggtgatgtttatgaaagtgacccttatgaggcagaataatggcctcttaaacatgtccacatccgggctggatgcaggggctcacgcctgtcatcccagcactttgggaggctgatacgggtggatcacgaggtcaggagttcgagaccagcctggccgacatggtgaaaccccgtttctactaaaaatgcaaaaattagctgggcgtgggggcgcatgcctgtaatgccagctacttgggaggctgaggcaggagaatcatttgaacctgggaggcggagattgcagtgagcctagattgtcccactgcactccagccagggcaacatgagtgaaactctgtctcaaaaaaaaaaaaaaaaaaaaaaatctacatcctaactcttggaacacatgcatttacttttcttggcaaaaacactgttcaaaggtgatgaagttgagtatcttgagaaggaaagcttattctggcttatctgggtggctcccagtttcatcataagggtccttgtaagtgaaagagcaaggcaggaggctcagggtgagaatgatgcagtctgagagactccactggccattgcttcctgtgaacatgtgtgataagacaaaattataactaatttagttatagatgtaattggcttttatttgtgatttatgatttggggcagctctccctctacagatgcctcagcatcccaagtagctgggactatattgcgggatctggcctgcagcctgcaatgcaatggggctctttctttgttctcaggcagatcggcaggttgagaaataaaagacacacacaagatagtgaaagctgggtccagaggggtcaccgccttctggtcctgcgatgctgccaatgcactggatataccagcatttattattaagtttagtgagagtgggggtaggttagtgagagatttagggccatttataggctctccacaagggtcgcattccattcccagagctatggacatctgcttttctgggataggaatcttggtaatgtgaaacctccctgactgcatgtccgttcataggctctctgcagggggaagcacatcacgtgctgttggctcattctggcagtccaacctggcatttgtctttacacaatcctgcatgcaatttcgtatttacaataatcaggagcatttcatcttttattccatagcaatagtttcagggggtctccctacatctcccccttttctccaatttaaatgaaccatagcaatcatagcttggcactgatcacgattggattgaagaatatttttttccaattttacacatgaacaataaaccaatagcacaaattatacacagaacaaaattaacgatagtggatcctcccaaagattttacctattgaatggggttgagattagataacccctcagagatactgtctaaaacttcagcactgggtaaagcagttaagtgtgcttgagaagcttcaaaaatctgttcttttagcttgcttaagtctaaacttaaattatcttcacttccttgtaaatggcattttactgattcccagttgtgaacagactcattatgttggaatggagttatacaaaaatcagaagtattccaatcaggttgcatttgtaatctatgttctaaactcataattctatctcccatccatgtaacagaagcacatcatgtgctgtaggctcattctggcagcccaacctggcattgtatttacacaatcctgcatgctcttttatatttacaataatcaggagcatttcatcatttgttctgtagcaatagtttcagggcttctccctacaggactacaggtgcgcgccaccatgcccggctaatttttgtatttttagtagagacagggtttcaccatattgaccaggctgatctcgaactcctgaccttgtgatctgcctgccttggcctcccaaagttctgggattacagatgtgagccactgtgcctcgccaataattaacacatttctttgagtttttgtaattccagcacaagagaaaccatttgatatttgaagaatggctgcacaccagtgaaaacatctgtagattgcaccacacgagggagactaccagtatgactatcaggaggaaaatatcaagagtttggaatatgcaccttaggcaagatgcaaaccaactacaataggatagatcaaagaagaagccagaagagtctagtcattttaactaggcagcacatttaatgatttttacaactgagtctgtaatacccaatgtatttatccatgtgcaacaagaagcgtcagaaactgcacaggctcccctctgttcagctgatagagagcaattctattatctagcattgcatgtctatgttaaattaaaacagggagcgagaataggcaagtatagaagtggaagcctaaaaaaaactccatacatttgaggaaaacattgtgttacagatgcagctaatgtcagcctttgggtggactaaaggatctcttggtatgtaaaaatgtgtgggccaggtgcggtggctcacgcctgtaatcccagcattttgggaggctgaggcatgtgggtcccctgaggtcgggagttcaagaccagcctgaccaacatggagaaaccccgtctctactgaaaatacaaaattagctgggtgtggtcatgcatgcctgtaatcccagctactcaggaggctgaagcaggagaatcacttgaacccaggaggtggaggttgcagtgacccaagaatgtgccattgcactccagcatgggcaacaagagcgaaactccatcttataaaataaaagtgtggttgacatgatatatctgacactgttaacttactctcagaagctacttcttgtgaaatcctaagtacagcattattctgggaagcaaaggcgacaggcataagcaaggacaaattaagagaggtaagattcccatcatgattgatagtcttgttctgacatcttgagaaaactgtccacagtgtaaagtcatcaacttgttgtcttggtttgcagtttgagtgtctctaagttatggtgttgaacatttggtgagttcttagcggcccacacctcagacatgagagttttctcatgaaatttacattgagttgtccatctccagcttatatggcttcaggaacagagccactcttgttcttaattatttcattggagaaaattgaattggaagaactaaaagaattcagggtccagtccagtctaccagtggattataaatactcaaagataatgaacagtggttcaatctggtaacaggtgtactacagttctgcttttcaacatagtttttctgtctataggagtctctatttttaccaaagataattccagtaggatgaatttgtttgcaaaataggttgagtctcaccgaacttgcccagactttttacctaagtgcggcaagagtagcaatggaccatagaggctctttttaaacttcgctttgctagaagtttttaataagaatctcagattaaacttccaaaaacctcttgagactaggaagccaaaccaagggcaacttcagactttgcctgcattccctatgggtttattctatgtatattctcaaatataacatcccagtcaaagccttggtaatataaccgatgttttcaaatgtgtcctgttataaagagagcagatccttactgaagttgtgcaaataactttattaccataaacatatgaatactcatgaatagtttcccaattctggggcactcagcaaaagcaaatgtttcaatttttgtttacaaaagtatactttaccaattgttcaaggaaaaaagttcataaatctggagaataaaacattcaaagactcagcacattttcaaatagaaaattatgaaaacattatccttttgattatttattccaataaaattgagttttttttcttctttgtcttgaatttcatgaaggtatcagcctgttcattaaaattttgaaagttcttagtccagtggtatgatcttgaagttatcaggagcttgtattccagagtccttgtcagagtcttttccataaatctccttgaagaaaaagcaattttggactgtagctgatggtaaatactttgaggaagaatcaaagcaactgtctgggaatgacaaagatttaaaatgactatggttaaaaatctaatgagaatttattatggtaaagacacagctcacatagaaatctagttacttctgtggcataagacactatgataacatatttgatttccagaaatttcatataatttttataatactcattaaaaaaattttttttgagatggagtgtcactctctcacccaggctggagtgcagtggtgcgatctcagttcactgcaagctccgcctcctgggtccatgccattctcctgcctcagcctcctgagtagctggggctacaggtgcctgccaccacacctggctaattttgtttttgcatttttagtagagatggggtttcaccgtgttagccaggatggtctcgatctcctgacctcgtgatctgcccacctcggcctctgaaattgctgggattacaggcgtgagacatcacgcccagcctagaatactcatattattaacattcccataaatattatttagagaaggtttagcatcaattatcccttatttgaaaatgctttctataaatttaatatataaaataaggtggattttccgttcagcttctgtttctcaagaggattactgagttgttggtgtagcccattcataaataggaccaaaaaagtatagtcttatgtatgttgaaaaaggtccttaggtaattccagtacttccagcagaaaatcattgatttagttttaagttctacctattacaataagagttctccatccttgttacatgttagtagtgtcagggaagacttaaaaattaccaatgcctgggtccgtctccagacctttaaactggaactaatgggtggggcttgagcatccacttttaaaaatgttttccagtgattccaatgtgtagctctatttcccatcagatttctctgatttcttgtggcattcaattttttctattttggtatcatgattattttcaggtctcatttcctgtcttaggctttatgtctcctggcgtagggaccttgccttcttcatttctgtatcttttttaaacacatgaactggtcatcaggaaaaggtctcaaccacacataggttgtgtcctgagtctcaggttcacatgttaatcctaaagtctttgttctccacgaggtcagatgttgcttgtgatgaagggtgtggttaagtctgcagtgcagatggtggaagggatttcactgtttttagacatagcattggaactaagaattttatgtctatatgggtgaaggggcagggatgtgtaggaagacagttctaattaggatgaaggaattatactaggaagtagaggtaaaggaagtgagaaggcttagtaaatagaagaaatgtgaacttatcaaagtggctagagtagaccactggagattcttgattaagtgaattaactagattttagaaaggtaatgaggcagtcatatgcaaggaagatttcaaagtctggagacaagaagtcaagcaatactttgagaagtggttgagctttatgggaattgagagaattacagtattgagagatgttaaaagtaacgaagagggtttcatcatgtgaaattgtgtttctcatttgaatctgagaaacaaatgagcagaggctggagataattatgtctaaaagacagtggggtacagggagcataaaggccagggagaaagggaactgtaggaattagtgctgagaagcaggagtttagtggaggaaggaggagatgcagtcccagatacaagcaaataagtcttttccctctcccaagcatggcagtcagccctgcaggaaccaggataagagaaaaggccatcatacctgccagtcttcctgaaatacagaaatgacatcaccgctgctctattggagtaaagaaaggaagacgtcctattcctggaggagctgtcatggaaagaaaagaaaagaaggaatgaagatgatgttattttacatgggggagcttgaggaacaggcatgtagcatgaggtactctataattgtttcttcaaggactacattatttctgttggaaaattgatgggagatgattatattcttgcagttttttttccctcttaccatacttctaggttggtgatcagtcctctgtcaattctctactgcactcagatattttggaaggctttcagatgtgagaaaggctgattgctattttctatgtcattagaacttgccacctttgcacctttccatggttgcatctttttctcagtgtctctgttatggcagtcacgaatgagaccctgccaggtctccatggcaggcacctgatttacagaaggcccagatcagtacatttcaaattcaccacctcctttgcacagaaagcttctttcctacaggctcccaggaagggtgtgaaagcaagcctagttctctgaggatctctttaactccaatgggtgactggttggaggattccccatcagccttgcaaaaactcttagaattgcattggtacctaaaacttatttctctttccttttcacaggaatcagccctggatagtggtctgtgggttctcccatactaccttcatgcctgccccacattccctcagaggtgtcttccctgataaattatcttgtatgtctaatcccatcttggatgcatctcaattggtaaaaactaacataccaggcttgattctttgcacttagctttttttctttctctcccacaagtagtcagtagccatgttctagtgttctatgtgttacctctttttccatatgtatggaaaaaggaaggtactgttgaggtgcacttcctatgtgccaggccctgtgctcaatactttacctgtatctcatttaagccacacaataaccctgtcaggtagacattatttccattttggcaatgaaaagacagaagcttagcgtggtgtaaaatctttcctggtgtcatatggctagtgacaggtggatctgagatttgattctaggactatttgacctcaaggctaatgataatggtagtaatatggtagctgacattggttcctctgtgtgtggcatcttgtttcattgactgtattaaacctttaaaagaattgtatgaagaaagtagcctcattgcagttttcaggtgaggaatcagaggttcagagaagttgagtcttgtgcaagaaatttataactgtaaactcttacattaaaaaagaagaaagagctcaggtcaacaacctactttaatacttcaggatatgaaagaagaacaaactaaacccaagcacagtgaatgagggaaataataaggattagagtggatataaataaaatggagaatggaaaaataatagaggaaattactgaaaccaaaagttgattcttcaaaataaaatcaacaaaattgacaaccattaactagattgactaagaaaaaaagagaaaagtttaaaattactaaaatcagaaatgaaaatggactctgagcatggtgggtcgtgttttaatcctagcactttgggaggtcacagcggaaggatttcttgagaccaagtgtttgggccagcatagttaaccctgggagatgctgtctctacaaaaaataaaaaaccaattagctgggcatggtgacatgcacctgtagtcctagcatcttgggaggctgaagaaggagaattgcttgagcccaggaggttgaggctgcagtgagccatagacacaccactgtattccatcctagggtggcctacagagtgagagcctgtccctctctcttcaaaaaaaaaaaaaaaaaaaaaaaaagaaaaatgaagcgattactaccaattctaataaaataatgattatgaaagtagtataaataattgtatgctaataaattggataacctatatgaagtagacaaactcttagaaacacacaaatatatgaatagaactataatcagtaataagattgaatcaataaaagtaattgatgaaattcagtattttttcataataaaaacattctaagaatggaaggaaaccacctcaacataaaggcaatatgtgaaaaacccaatgctaacatcatactcaatagagaaagactgaaagctttccctgtatgagcaggaagaagacaaggatgcctgcttttgacacttttattcaatataatattgaaaggtctagtcagaaaaattaggcaagaattttaaaaaagacattcaaattggaaggaaggagtaaaattatttctgtttacagataacttgaacttatatgtagaaaatcctaaagatggaacaaatctattaggactaataaataaattcagtaatgttgcacaatacaaaatcaacattcaaacatcagttgtatttcaatacactaaccatgaacaatctgaagggaaattaagaaaaaaaaattcaatttctattaacatcaaaaagaataaaatatttaggaataagtttaaccaaagaggtgaaatgattatacccgaaatctacaaaatattgctgaaagaaatgaaagaagacatcaataaattgaaagacattttgttttcatgaattggaagactcaatttggttaggaggacagtgctacccaaagtgagctgcagattcaatacaattcttatcagaatctcagtgacatttttgcagaaaaagaaaaatctgtcctaaaatttatattgcatctcatgactctaaatagacacacagctttgaagaggaagaatgaagctggaggactcacacttcctgatttcagcatttactacaaagccccagtaatcaatacagtgtggtactggcataaaggaggacatagaaattaatgaaatataataacctagaaagaaatgcttgcatatatggccaaatgattttcatcgagtgtgccaagatcgttcaatggggaagggacagtgttctcaccaaatgatattggaaaagctggatatccaagggcaagaagagtggaacctttacctaacaccatgtgcaaaaattaacccacaatacatgaaagatctaaatgtaagagcaaaaactatacaactcttagaagaaaaggtccatgatactggatttcacaatgatttcttggttgtaacaacaaaagcataggcaacaaataaaattgataaattggacttcacaaaaatcaaaaccttttgtatatcgaagaacattatcaggaaggtaaaaaggcaacccatgaaatgataaaaatatttgcaaattatatgtgtgataagaaattaatttccagaatacatgaaaagctacaagtcaacaacagcagacatccaaaaacccaattaaaaaatgaacaaaggattaaaatggagttttctccaaggaagatatacaaatatccaataagcccatgcaaagttcctcagcatcatgaatagttagagatatgcaaatcaaaaccacaatgttacaccacctcacacacttgatgggaatgggaaatgttatagccactgtaaaaagtggtgtggctgtttctcaaaaaattaaacaataaattaccatttgatccagcaattccacttctggacatactccacatagaattgaaagaaatttgaagaaatatttgtactctgatgttcagagaagcattactcacactagccaaaaaatggaaacaaccaaaaagtccattgaaagataagtgggtaggcaaatgaggtgtatctacaattaaaatgttattcaaccttaacaaggaataaaattccaatacatcgtgcaaaatggatgaaccttaaagatattatgctaactgaaataagccagacacaaaaggataattatcatataattccatttataaaagatagttagaatagccagttacatagagacagaatgtagaatgttgtgtgctaagggttatggggagaaggagtgagttactgttcattgggtacagaggtttaatatggtaagaggaaaaagttctggaaatggatagtgtgatggttacacaacactaaattgcacacttagaaatagttaatggtaagtcttatattagatatatataaagtgtttggtagtcttaccctctctataattacacactttttggcactgcccctttcctgcgatgcagagccccaggggtgaatctccctatttctccagctctgcatcagtcactatcctccgtgctgtgtcccacatgctgtgcccacagcctcatacagccggtgacttcagagccaggacgcagctcaggagtctgccctgaggctccctctcttcttatttccctgcagcctggcccgggggaggcttggcttcaactggcagctcgatttagccaaattcaggacaggccaccagggctctttctccacacatgctggtcccaccccaggtggagtcaggcagggccagtcaccagaggagcctggagcagagcaggaagcagagtctgagctgctcctccctcacccaaggggcttccccgtctcatttgggggaacagtgtgagcttgtttcaaagcctcagatgttccttgtagctcatggaagaggtacaagaaaacaaagacgtggcagaaggggatgtgttggtgacatcgagaagcaacttgatcttgaggactctccttctcatccgtctctgaagtctcttctaccacatagggctcagggctgataaagccccctccctaactttcttaggccagacacaaggtcagccatgagaaaacaaaaacaagaagagagtctgtagagacaaattgggagggttcaggaggagaatttgggatttgcttgtgcccatgggacacaggctgggaataaaaatgttttcctaactcttctctgaaagccagatagactccacctaaaaccctattgccaaggatgctgggatccacttaccagagacttcgactgtcatggatttggagctttccttgccagtggctgagttacgaacagagcaagcatagagccctctatgctttgtagtaatttgggggataaagagcttttgttctgattgctgaaacttcccattaattgtccaagagtactatgccggtgggttacattccgcgaagcaggacaagtaaaggttttgtcctgaacggtaataggtgaatgaagggtaaattctggggaggtctggaccatctggagcaaagagaataaagccacaggtgatgtcatccgagggaaggggatgctcctggtctcttaaagggacacagtgaccctctgagccaagacacaccttcaagtcccagccgaaccccctctatgttcactgagctgaagcctgaggtattcacctgtttctccccaatcacaagctatgggcaccaagtctcccatgacaagagcgtcccctccccttatattcttggttaaggctgtgcctacccaggatttcccagggcagggagtcatggccagctcggatgtccagaagtaaaggtgtctatacttggaccggagaaagactgagaggactggcttgtggtcatttagagttaagctggtgtcctggcccacagaggaacaaaagatactcacagaggacattcagggtgactgggttactgcggatgccaccatatcggtcccgtatttcacattgatagggtcctgtttcatttctcgtgacactgggtagaatgaggatcctgttttcaatgggtcactttaccctgggactgactgggaggctctgaccatttagccaccacgtgtaggtgtagttctcacttttagggtcacaggtgaagggtaagacatccttattctccctgggttttgagttgttgatggtgatgtagggcttgggcagcttcgctgtgtggataacagagagaagattgtcctgtgtgacacctttgattcctccacaggcatccctcaatcagagttggcatctcccacctgtcatcccacgcgagtccttgaaagccaatagctggtgcatgtgtcacaagacagatgtatgatgatctaagggctcaaagactgtgaggccgcctgctctgtcttagggaagcatagactttctcaagtgtcaattgagcagcagtgttgggtcatggacagacacatcagtaggagtcacagcccctggtacccctcccagtccctccctaatcagttgactggctggctcaccttgggttccttacctggaatatgcaactgctgggccccttccaaattccatcctactttgtccccctagacgtgatttctctgcagcttccatttccaaggacattctagagatgagtaataatgggacttcccattgtcctgaaaccctgaatatactgagcagcctggcctgggactggatgtttcagcaaaaataagacagcagagaccatagtcaagcctggaggtcagttcagtctacaggcagtggaggcaaaaggtggggcagttttttgcaggtgtttcatgatgacttacttgaaccagtgacctctaaagatagagcagagtgcaaggaatgatctagaaagagtgaaggggacaggcaagagctggaggctttggagcagaaccatgttgcctgtcctgcgttcaagtttcctctccttctgcagagggcaggtgaggaccatgtggatctttccagaaatacatgtggacatttgcatatgcagaactgattggtggaaagggtgggaatgaactgctggaaatctggtcctcatggaccatgtgtgtttgatggatatgatacaaatttagagagaagttttgcaaatattttatttcattggacattctactctctgattccatgggttcgactactctagggacctcatgtaagtggattccagagtgaatatgagaagagactgctggtttccaggagctgggagtggggagaatcagaaattgttcatgggtgtgcagtttcagttatgcaaggtggggaggttatagagattggctgtcgagcttgatacctatagttcacacagattgagtatttcttatgcataagacttaggacaaaaagtgttttggatttctgacattttttgattctgaaatatttgtcatatacttactggtttagcatcccaaatctgaaagattcaaaatctaaaatgctccagtgagcatttcttttcagcatcagattagtaggcaaaagtgggaggtgataagccaaagatattcttgccctttttttttctctcaccacatttctagcttggtgattagtttttggtcaattccatactggccatgctgcactcgtatgtttttgaaggttttgggatgtgagaaagcctgattgctattttctgtgtcatcagaactttccaccttttcatggctgcatcatctttttctcagtgtttgtgttgtggcagtgattaataacagcctgtcaggtcagatttaggacagagttttctgattctgcaaaaaattttactgcgattctgctaggggttgcattgaatctgcaactcactttgggtagtattgtctttctaacaatattgactcttccaatccatgaaaatgaaatgtctttccatatattgatattgcatttaatttctttcagcaatgttttgtagtcttcagtgtataatcatttgacctttttggttaaacttattccaaaatagtttattccttttgatgttaatgtgaattgaaattcttttcttaatttcccttcagatagttcattgttagtgtatagtgtaaagaatgatctagaaagagtgaaagggacaggaaaagctggtggttttggagcagaaacatattccctgtcctgggtttttgattttccctctccctttgcagagggcaggtggctcttccctgatagctagatagacttcactggaaaacatattgccagtcctccagggatccactcaccagggactatgatcctcttgattatgagatttgttccaccaatggctgagttatggatgaaacagacatagacccctctatatgttttggtgatttggggtataaataacacttgtgctgattgctggaacttcccatcaatcagccaagaatgctctgctagtgggtgagagtctgtgaggcaggagagcttggggacttcccttgtatggtaataggtgtatgaggaagaaatggtgggggcatccaggccatctggagcaaagagaataaggtcacaggtgatattgtcagagggaagggaaaatcctggtctgtggaagggccacagttgccccgtgagccaagtcgcaacactgaagtcccaagaaaatccctgctgtgttcactgatctggagagtgagacattcacctgtttctcccatcacaagctctggaccatgagtctcccatgacaggagcagcctcttttctcctattgtggatcaagcctaggcctactcttgttttcctggggcagaaagtcatggccagttttgatgtccagggataaaggtctctgtacttggacctgagagggactgagaggcctggcctctggccatgtgtatttgggatggcagcgtggctcacagaggaacagaagatagtcacggaggagattcagggtgaatgggtcactgcggctggcactcactgggttccgtatttcacattcatagggtcctgcagtatactttgtggcaccaaatataaagagggtcctgttggttttggacagctgcaacctttgagtggtagggaggttctgaccattcatccaccacaggtagcttgcgttcggagttgcaggatcacagattaagatcacagcctccatgatctccctggggtttaatttgctgctggagatggagggcttgggagtctccactgtgcagaaaacagggagaagattgccctgtgtggcacctttgattcctccaaaggcatttttcaatcagagttggcatttccaacctctcagcccacccgagtccttaaaagcccatggcaggtgtgtgtgttacaagacagatgcatggcaatctgagggctcagagattgtgaggctgcctgcttcatgtgggagaagcacagactttctcaagtgtgaattgagcagcagcattgggtcatggaaagacacaggaccagcagtcacagcccctggtgcctctctgagtccctccatctccaactgcctgcctggcccaccttttggtcctcacttggagcatgcagtgctggaatcttcttagcttcagtcttactttgcccccgaggcatgttttctctgcagcttccctttccaaggacatcctagagatggatgatggaacttcccattgtccttaaaccctttgggtactggaaagcctggcctgggactgggtacttcagcagaaataacacaggggagaccagagtcaagcctggaggtcagttcagtcatcaggcagtggagccacaaggtggggcagttttcccagatgtctcatagtgactgacttgagccagtgacctctaaagatagagcagagtccaaggaatgacctacaaagagtgaaggggacaggcaagagctgatagctttggacgaagaccacgttccctgttctgggtccatgatgctcccttccccctgtagagggcaggtgaggaccatgtggatctttctggaaatacatgtggatgtttgcaaatgcagaactgactggtggaaagggcaaacatgaactgatgatggaagtctggccctcatggaccatatgtgtttggtggatattagaccaatatttgggaagaagtcttgcagatactttctctcattagacattctactctctgattctgagtttgactactctatgtacctgatatcagtggattccagagtgaatcagagagtagaatagtagtttgcaggagctgggatcaggggaatagggcgttgttccgtgggtgtgcggtttcagttatgcaggatgaggaggttctagagatctcctgtgcagcctcgtgcctatacttcatgcagatacagtgctccttatgcagaaagcttaaaacaaagtgttttggatgtctaattatttttttattttggaatatttgcagtacatgtactggtttagcatcccaaatctgaaaaatttaaaatccacaatgcgccagtgagcacttctttttagcatcacatcagtggtcagaagtgttgagttttgagcatttcagattgtggatttctggatttcagatgctcaatttgtaatactgtaattttcccataaaaagttttcaggactttagacctcatgttatgttctgactctagtaacaaaaaaaaatttggaggaaacattgaaatgttttcataagtgggaatttttactgatggtccaaacatctgagatcaattgctggtagtagtatttctcttgaggccaacataaggtttaggtgtgccatgaattccagcaggatcacattatgctcaaagaaagatgccaaaggtgatttgaaattagcaactccttaagtagagagagtcccgttaaaaggacaaaactgggtagtgtgtcaattacataaagggaggaatgatgccaaattaaaagaagtgatgtgtgttatgttagtaaatatagaaagaactccctgcttctgctttctgtgccgagttaggaaaaatcgggaggagcacaaagcaggtatgtgaaatactttcttcgttctctcttaagttcaggaaataacactagagtttaagtttgtgtgaattaggaagagtctaagtgagatgccaatggctcgtgtgtctccccacaggaagaactcgaacttatgaaagcagcatcatcatgaggaaacagttgtatgtggcacaggcagtaataccatcagatagcacccacctggccacctccagctggtccccaaaaccaccagtattcccattacatgtaggttacagcctttgtagttgtcccacaacaaagaaatttaaaaattgctattgtcaaaacaaaatattaaatatgaaggcgaatatgttgttccactttttttccccactctttttgacctttcttgtttcagttttggaagtttctattgacacatcctcaagctagggattctttcctcagctctgtgcagtctaccagtaagcatcaaaagcattcttcatttctctaacagcattttttattttctgagacagagtctcactctgtcaccccggctggagtgcagtggcatgatctcagctcactgcaagttccgcctcgcgggttcatgccattctcctgcctcaacctcccaagtagctggcactacaggtgcccaccaccaagcccagctaattttttgtatttttagtagagacggggtttcaccatgttagccaggatggtctctatctcgtgaacttgtgcccgccttggcctcccaaagtgctgggattataggcatgagccactgtgcccagccatctctgaaggattttaacgagttgttgacttttgagtttgttcagtttttacttagcgttagaaccgagtgacaaatttcaagcttgttatatgcctgacaggaagccagaagtctctaggaagtgactggagaatgtgagctccacagcaggttgaggatggagtcacgagtgaaatgagcccatgggctttggggactgcaggcctgtccagcctctgacaccctggtgagtcagagcaaagattacaacagtgacaggaaactagcgtggctgactccatctggcatctagtctcaggctggctgtcctcactcattcctgggcataggccaggctaacattgggaggaatttagtttatggtttaactttgaaacaagaaagataatagtacctccataaaactaacacccttactttgcccaggggctgcctttctaaaactagtgaaagaccatgagattgagattataggagggaaccgaattctgctacaatgtaggcacagtttctataatccctgactgatcaaatgtcatttggccagagtttacaaaatttgtaactaattgctcccatagataacatcactattgcagaacgtgagattagtcttttgagatgtttttcattcttttgcattctggcaactggctgacctcatccatacccatgactaatggctcagccagccatgtggtccctacctagaagtggattcaagcacaaacagttcatttccctccgcccgcatgattccatcaccaaacaatcagcagtactcattttttagtcctgtgtccctgaaatcatccttggaaatgtctaacacctgatccactggggaggctgatttgagtaataataaacctctgtcctcctgtttggcagacttggagtcattaaaatctttctttactacaaaccaccatttcaataattttttttttgtgtgtgtgtttgtgtctgtgtgtgcagaaggccagaagaacttgtctggcaatgataacagtggatggagaactgcctatccctgtcccatggtcttgtccacaggtcagcctcacaaagggaaagagccctagatgggaatacattggaagctcattctcttagtgacctggggacattggctggagataaagcccggcaggagtggcaactccaggtgatttctacacctttcctatttcctgggaggtgggccaggccacagtgttagcaggaagggaacagaactgccagactaattagagggagtgtctggggaaggcctaggtgtggaggaagaagctgtgcaggacagggcttgccagtcagaatgaagtgggaggaagatgagggacacagagaagcagagagaggcagagacaccatggcagtgagcagtgagggagacactgacttcagagaccccaggtaccaggtgcccccatttcctcagtccaggaccaaggagccctgagaaccctccggtggccaaagagcttcagagttgcatgaggtggggtggctttaggggcaagaggtagtagggggatgaaacatgggtgtcagcctctgaaggacaagggacaggtgtggctaggacctcctaggattctgcatccaagatccagtctctaaagaggttttggatcattcatttcttcatttgattccttcatttgttatgtgagagctcctgagtatgtgtctctggctgggcctgtgctggtgcagggtgtgagtggggaaagaaaacaaggtcctctccttgatcctctcatgacagtaacatggacactttgggaaacacaggatttcaggttcagtgatgggggttaagatctgagggggaggcctggacattttttttgcactgactctgatggttgaggcaggtgatttagttctggagtacagactaatcagctgaccatttgctctcactcctctgaggtttggatgcctaagaagagaggatttgagccaataaatgactatggggtgcttgaaacccagtaagccctcacttctggtggaggagaggatgggcctgtggctgcagacagacctcatgtgaccctgatctcccctttgggtttgtgtgactctggttcaaagactgtgccttcctgtgcctctgttttctctcaatcaaataagttaactggcaaatggactgtggcttttcatgctatctgtgaataaatgttaaagtattcacagtcacctgacttaatgcttggcacagtggaggtgttcacacaaacagcatttattattaatttgcttccatgagaaagcacatttatgtcagatccctgtggacaagctgctaccagttacaccttctctcttctgtttctgcttccgggaacattagactttctatggactgtcctgagcctcccaaggcagttggctgatggcctacaaagcttgtctttctgtcctctccactctgaatgtcaggtgaagaaagctctgtccttgcccagatgaggctctgagggctgagccctagctggtgaacagctgcaggagacacagtcctcagacagctggaaaacccttggtcccagtaagccctgcccaagaagccacaacccagccccagtacaggctccttagatttatctgcagcaaggatttagggacaagggtctggggttgaggcttctagggctgagcttctctgagagtatctcaggtggcctctcaggccaagccctactcagttatccagggtctttctcagggtcaaatttatgaagagggcatgaggtgcctggctgagactgatctcctcctgctgagtccccccatcagactgtccttcctctgcagcgagtgtctgcagggtctggatgtgggaaaggaattctgatctgttgaaatttgtctcctctgtgtgtgtcctgcactaaatgcccaaactccagcatgggacataatgcagagggggacacaggcacagtccaggcctgacaatcctgtgtgtgtgaagtagaagtgacccctgtcccccaacacccagggatcatgtggaatcacttacggtataaggtgaaggtgaaatttccagttactcctctagtcccatcacctcgctgtatgatgtgtaaggtgtaggatactccgtcctcccgggtgacattctggatcagcagggatgcattggaatatactgtttctcgtccactgtatgcaggcccatatgtaattctttgaccgtctactacatatgatgtaatgtaatggtagaggtcccttatttgccctttctaccacatgtaaccagtaagattctggggcaaattgtggacaagtagaagaacatccttcccctcggaaactttgggtggctgggcttcagtcgtgacttgggcaatggtaggtgggttccagaagtttaaaagtgatgctaggaggtggagagagcatcagtcaatattgagacctgtgtattggtgtgaaaacatggggccctgggtcctgagaaggtctcttcagtcctcagccttgacaacacagacacacacacacatacaaacacacacacacacacacaaaagcggcatgtgtgattgtgtgtgtgtatgtgtgtgtgtcctactgtcctactaggtcaaggtcagcagcatgacgcccattccttcaacacttctgaccttggcatttttctgtttggaatcctcttccccaggggtccgcatggccccctccacactgccctcaggtcctgcttacatcagggcatcgttagacttctttcctgatgcctgcttcagagaccctgggtcttccctttctgacctttccctgctctgctccctccagggttcttgtcaacacctgacctcacattctagatctctttgcatgtctgtcttcccccccatgacagcgtgagctccgtgaggacagggacttttgtgatcttggttgcaccccagtgcctggaacaggctgcagactcctgtagatgtgagagttctcagggccctccatgccctgggtgttttttttctcccaattgttgaggttttttgctgaggacagcatttcatgtcctgcttatatttttatttgaagtgtcatctgatatagttattattatcatttttcaaaatgtgctggcctctgatgattaatcaggaaaacagaacacttaagattttcctacctcttaccaattccggttcaatgtgactttcctattttgacccctgtccctctctggtgtattttcccctatccaggcatcaacagagcgttctttccttttttttttctttttttctttttttttttttttgtgacggattctcgtactgtcgcccgggctggcattcagtggcactatctcggctagctgcaacttctgcctcccgggttcaggtgattctcctgcctcagcctcccgagtggctaggattacaggagcacaccaccatacctggttaaatttttgtatttttagcagagacagggcttcactgtgttggccagactgatcgtgaactcctgatctcctgatccactcgcctcagcctcccaaagtgctggcttctttcattttttagaaccccatcctctccaggagaccccatccagtcactctgcttcctcctcctgtcctctcccaggaagttctctcctcacctgtgagcaggacccccttccatttgatgtgctgtgtgcagggaggggctgagaggggccccatggtctctgctgcttgtgtgttctcctctgtggagatgagcctaggttccagaaacttcctgagcacggctgtaggctgtgctgtccttcctccttctgcgctgagcctcttcctggggcaggagcacttctcaggctcatgggtggggttaggcccaggacacctctctgtcccctcctctctacatcctgcctccttgtccctccttctgtttttccttttgtctgtgtttcaggtccctgggaattgtggaggcctctgcctttttcagcagtgattctttcaccaaacctcaacacacactttgtgcagacacaaacacacacagacacacacccccccccccacacacacacagaagagacacacacagacccacagtcacacacataccctgcaggttgggcaagcagagtcctgggcctcagcctccaggtgtccccatgggtcttggttgcggtgcacattcatgccctttgccctctttcatccccatctggctctcccttgcagtgcaggaggctggagctgcaccaggtccctgtcacagtgatgccccattgtgctgtgtgtgagctgtgtgttgcctggtgagaaggacccttcctttctctaatcgtgtctagcttggctgcagcttccaaggatggacattgaggacctgggtgtcacagaggaaagtgtcctacctggaggtgtgcagggtgaatctctcatgcctcttgggaggagaggcctgtgctggttgctctttgggggctgtgattcccatagtcaaagggacagttcttggtcagtctatggctccctcgggtctggcggctgagctgaagctcaggatttctcatgttcttcctgaccatctttgatgtcctctcttctctgcccagctgattgtcctgtggtcaccacaccttccccctggtggtgcaggaggaagtggggagtcacccaggaaccccgtgggacatggctcattgagacgcaggagggggagcctgggacagggcaggggttagaggtggagagattcatcccaacttactccgtggccatgatgggctcagccctccatgtgctgacatacccaggggtctatcctgagggttttgacctggtcaagctgctctctgtagaggaggaagaggcagtggccagagagcctgtctggagggaccttgctcacacctgagagggtgtgtgggggtgagttgtgttctgggatcaaagagcaataacaccccccttctcccagcaagcacacaggagaggtctgtcttcccaagggacagctgggggtaggtggccacatcccggatggtgcctgtgtgtgaccatcacacgcactctgagcaccccggggtgcagcgggcaggcaggtcacagggtgcctgactgattcccggggaggctgtgggtcctcaggcagccgctgttctgtgtcggcgctaggcttggcctgggatgccccagagaagaggacagatggagcaggggcgggtatttagagagcagtgacagaaagagttgatgaggatggagggaggccacgaggggaaagcaccccgtgtagcgtcgcgtgcaccagtgctgccctgggagatgcctttagctgggcccagggaaggagcaggtgtgtggggaggagctacctgtagggggagtggtgttaggttggtggccaccaggtcagggaggagctgacagagtccgtgtggggagcatggagagagctgaggacttaggccgaagtgaccctgatgagggtggatcctgctgggctgtgggttccgctgagggaggttggcatcccctaggaaggctccagggtgggagggactctgtcgccctctggtggacagggagggaagtgtgaacggcagcaatcccaggccaggctgcatgttttattccacatggatctgcacacttcacactaggtcacacatatgttatgttacagctccatcacccttccagccccgtgagtcccagtctctgtggctctatgttcactgttctccctttcacaatcagatgtcccaaacgcagatttttgtcactttctgtgagttcgtgtttgtatgcagtaggcggcactgtatataccctgggggcagtgatgtctagggctgagcagtgcacgtgggcttgggaggagaagagggagcagcagagtgggaatatcaatgtcagagggacagggacaagtcactttcattttctcactcccagggaccagaacccaggattctgactccagggcacagtaccacaccttgctggtgtccctggatgtcatgatgctcatagtgtcatgttgccttggcattcattttttaaggtgtaagtttatttgcctcaaatcagaggcagggcttggtcaccatggcagttttcaatactgtatctggttcaagtggctccagttggtgtccagagatcaaatcttagaggcatctctcctgcttggtgtgctgggctctcctctctccagctgctttctttaaactgataattctgacattcaccctcacatttaaagtgaccacctctcagtcacagcatgagctcctggtcccagtgtttgctgcttgctttgaacacatccattaaagctccctgctggaaatctgtcagataacaccctggacttaataaaggcattggcttaccggtctcttctctcctccctgcctgggctcactgacctctgtgtctgtggtctccaggtgtgccaagtgctccccagtgtctgtaagtagtaaaaatacttacactttcacgttgtggttgtattgctgtggcctcacatgccatccagggcctgacattgacgctgccttgtgggacctgtgctggctgagcccctgctggagctgttgttttatggtctctggttctgctggggacaggagcttccagctaacttgattgaaaaactgatgcctttcattgaaaacactgggtcagatgatgtattcatgggcttcagctgccataacaaacaccttagcctgggtgaattaaataatagaaatctatttttcacagttctgtgaataatgtgctattctaaccactttaaaatccacaatcaagtgaaattaaccacacacacagtgttaaattaccatcaccactattttccctagaaaatttttatcattttaaactgaaagtttgtatcttttaaacaataactccctgtatgttccaccctagaccttgatcatctctactctgtctctatgaatttgcctattcttgatgtttcatataaatggaattatacaattatgttatttcatttctgacatatttcacttagcataatgtttccaaagtccatgcatgttccagcgggtgtcagagcttccttcctctttatggcagattatcattctgttgtatgtgtcaccatatttgtttattcatgtgttgatgaacacttggattgttttcatattttatcttttctgaataatgctgcaatgaacattcccatgcaagtacctgtttgagtccgtactttgggtatatacctaggaatggatgttgtttcaaatgagaatactatgattagcttttgtttttgttattattatactttaagttttagggtacatgtgcacaatgtgcaggtttgttatatatgtatacatgtgccatgctggtgtgctgcacccactgactcatcatttagcattaggtatatctcctaaagttatccgtcccccctcccctcaccccacaacagtccccagagtgtgatgttccccttcctgtgttcgtgtgttctcattgttcagttcccacctgtgagtgagaatatgcggtgtttggtttttttgttcttgcaatagtttactgagaatgatgatttccaatttcatccatgtccctacaaaggacatgaactcatcattttttatggctgcatagtattccatggtgtatatgtgccacattttcttaatccagtctatcattgttggacatttgggttggttccaagtctttgctattgtgaagtatgatattggctgtgggtttgtcatagatagctcttattattttgagatatgtcccatcaatacctaatttattgagagtttttagcatgaagcattgttgaattttgtcaaaggcctcttctgcatctattgagataatcatgtggtttttgtctttggttcttatgctggattacatttattgatttgcgtatgttgaaccagccttgcatcccagggttgaagcccacttgatcatggtggataagctttttgatgtgctgctggattctgtttgccagtattttattgaggatttttgcgtcaatgttgataaaggatattggtctaaaattctcttttttggttgtgtctctgcccggctttggtatcaggatgatgctggcctcataaaatgagttagggaggattccctctttttctattgattggaatagtttcagaaggaatggtaccagctcctccttgtacctctggtagaattcggctgtgaatccatctggtcctggactctttttggttggtaagctattgattattgccacaatttcagatcctgttattggtctattcagagattcaacttcttcctggtttagtcttgggagggtgtatgtgtcaaggaatttatccatttcttctacattttctagtttatttgcatagaagtgcttttagtattctctgatggcagtttgtatttctgtgggatcggtggtgatatcccctttatcattttttattgtgtctatttgattcttctctcttttcttctttattagtcttgctagtggtctatcaattttgttgatcctttcaaaaaaccagctcctggattcattaattttttgaagggttttttgtgtctctatttccttcagttctgctctgattttagttatttcttgccttctgctagcttttgaatgtgtttgctcttgcttttctagttcttttaattgtgaagttagggtgtcaattttggatctttcctgctttctcttgtgggcatttcgtgctataaatttccctctgcacactgctttgaatgcatcccagagattctggtatgttgtgtctttgttctcattggtttcaaagaacatctttatttctgccttcattttgttatctacccagtagtcattcaggagcaggttgttcagtttccatgtagttgacctgttttaagtgagattcttaatcctgagttctagtttgattgcactgtggtctgagagacagtttgttataatttctgttcttttacatttgctgaggagagctttacttccaagtatgtggtcaattttgtaataggtgtggtgtggtgctgaaaaaaatgtagattctgttgatttgggttggagagttctgtagatgtctattaggtccacttggtgcagagctgagttcaattcctgggtatccttcttaactttctgtctcgttgatctgtctaatgttgacaatggggtgttaaagtctcccattattattgtgtgggagtctaagtctctttgtaggtcactcaggacttgctttatgaatctgggtgctcctgtattgggtgcatatatgtttaggatagttagctcttcttgttgaattgatccctttaccattatgtaatggccttctttgtctcttttgatctttgttggtttaaagtctgttttattagagactaggattgcaacccctgccttttcttttttccatttgcttggtagatcttcctccatccttttattttgagcctatgtgtgtctctgcacatgggatgggtttcctgaatacagcacactgatgggtcttgactctttatccaatttgccagtctgtgtcttttaattggagcatttagtccatttaaatttaaagttaatattgttatgtgtgaactttatcctgtcattatgatgttagctggttattttgctcattggttgatgcagtttcttcctagccttgatggtctttacaatttggcatgattttgcagtggctggtaccagttgttcctttccatgtttatcgcttccttcaggagctctttttgggcaggcctggtggtgacaaaatctctcagcatttgcttgtctgtaaagtattttatttctccttcacttatgaagcttaatttggctggatatgaaattctgggttgaaaattcttttctttaagaatgttgaatattggcccccactctcctctggcttgtagggtttctgctgagagatccgctgttagtctgatggggttccctttgtgggtaagtcgacctttctctctgcttcccttaacattttttccttcatttcaactttggtgaatctgacaattatgtgtcttggatttgctcttcttgaggagtatctttgtggcgttctctgtatttcctgaatctgaatgttggcctgccttgctagattggggaagttctcctggataatatcctgcagagtgttttccaacttggttccattctccccgtcactttcaggtacaccaatcagacgtagatttggtcttttcacatagtcccatatttcttggaggctttgttcatttctttttattcttttttctctaaacttcccttctcgcttcatttcattcatttcatcttccatcactgatacccttcttccagttgatcgcatcggctcctgaggcttctgcattcttcacgtagttctcgagtcttggctttcagctccatcagctccttcaagcacttctctgtattggttattctagttataccttcatctaaatttttttcaaagtttttaacttctttgcctttggtttgaatttcctcctggagctcagagtagtttgaacatctgaagccttcttctctcaacttatgaaagtcattctccatccagctttgttccattgctggtgaggaactgcgttccttttgaggaggagaggcgctctgctttttatagtttcgttttactgctctgttttttccccatctttgtggttttatctacttttcgtctttgatgatggtgatgtacagatgggtttttggtgtggatgtcctctctgtttgttagttttccttctaagagacaggaccttcagctgaaggtctgttggagtttactagaggtccactccagaccctgtttgtgtgggtaccagcagcggtggctgcagaacagcggatttttgtgaactgcgaatgctgctgtctgatcgttcctctggaagttttgtctcagaggagtacccggccatgtgaggtgtcagtcttcccctagtggggggtgcctcccagttaggctgctcgggggtcaggcatcatgaacccacttgaggaggcagtctgcccattttcagatctccagctgcatgctgggagaaccactgctctgttcaaagctgtcagacagggacatttaagtctgcagaggttactgctgtctttttgtttgtctgtgcctggcccacagaggtggagcctacagaggcaggcaggcctctttgagctgtggtgggctccacccagtttgagcttcctggctgctttgtttacctaagcaagcgttggcaatggcgggagcccctccccgagcctcactgccaccttgcagtttgatctcagactgctgtgctaggaatcagcgagactctgtgggcataggaccctctgagccatgttcgggatataatctcctggtgcgcctttttttatgcctatttcaaaagcacagtattaggatgggagtgacccgattttccaggtgccatctgtcacccctttctttgactagaaaagggaactccctgacctcttgtgcttcccgagtgaggcaatgccttgccctgctttggctcatgcacagtgcactgcacccactgtcctgtgcccactgtccagcagtcgctagtgagatgaacctggtacctcagatggaaatgcagaaatcacccgtcttctgcatcgctcacgctgggagctgtagaccagagctgttcctattcggccatcttggctccaggaccctatgattagctttttgaggaagagcaaaactgtttctcctagtggctgtacttttttatattctcaccagcaatgtatgaggattccaaattctacataatgctgccacttgttatttaacattttaaaagaattgtagccagttttgtaggtgtggtgtggtatctcattgcagctttgactttgtattttcctaatgactaatgatgttgagtatcttttcatgtccttcttgactatttgtatatcttctttgaagaaacatctatttgagtcttttgtccatttataaattggatggtttctccctttgttattgagttgtagctagttcttgatattatctggacatgaaaactgcctatatgtggtttgcaaatattttctctcattctgtgtctattaattattttcttgatgatttcctttgatgcacaaaaggctcacatcttgataaagcccaatttatcttttttttctcatgcttttgtatcatagctaagaatccattgcacatttgaggtcatcaatatttacctctatgtctattttaagatgtttttatggttataggtcttatatttaactcactgatcaattttttagagaattgtttgatatggtgggaggtagagttatctaaattcactgttttgcatgtggttatctagttgtttctgcattatcattagaaaggagaattgttcctccattaaattgtcttgacacactcttcaaagagtaattgaccataagtgtgagggtttatttctaggctctcagttctatcccatttgtctttatgtccattcttttgccagcagcttatgtctattctttgccagtagcttctgttttaataattgtactcctttgtgagatttcaaataagaaagttcaagtcctacaatttattttggcaagattgttttggctattcaggggtccttttttgaaaggtggggaggccaatatttcacaactgggaaagccgtttctgtcttcttcagggggaaatttgggagaacattttaagaaactttatctaagtaggtaaactgttaccactttatttgctgaagtgctacgttaaagtgtgcattgcctcttgtggaagaattatgagaccctggaagcactagcccacatggtaagagacagtgaattccacaatgaggggcagagaggatgttgttttgggatacaatgttgttgggggagtggtatacatctctacttctttatgtctctgtatagttggtgtagggaccagccacacaaggtcagtgggtttttctccctgtgtgtggagatgagagattgtagaaataaagacagaagacagagataaaagaaaagacagctgggcctgtgggaccactaccaccaagacacagagaccggtagtggcaccgaatgccaggctgcactgacatttattggatacaagacaaaggggcaggataaggagtgtgagccatctccaatgataggtaaggccacaggggtcacatgtccactggacagggggcccttccctgcctggcaaccaaggcagagtgagagaagagaaagagagagagagcttacagcattatttctgcttattagagacttttagtactttcactaatttgcttctgctaactaaatggcagagccaggtgaacaggttggaacatgaaggtggactaggattgtgaccactgaagcacagcatcatagggagacagtcaggcctccaaataactgcaggtggacctgactaatgtcaggccctctacaagaggtggaggagtagagtcttctctaaatttccccagggaaagggagactctaagtagctttcctggtctgctaagtagcaggtgtttttccttgacactgaggctactgctagaccagggtccgcttggcaatgggcatcttcccagacgctgtcattaccgctagaccaaggagccctctagttgccctgtctgggcataacagaaggctcacactcttgtcttctggtcacttctcactatgtctcctgagctcatgtctctgtatggcctggcttttcctaggttatgattatagaaatgaggattattataatattggaataaagagtaattgctaccaagtaatgattaatgatattcatatataatcatatctaagatctatatctggtataactattcttcttttatattttattataccggaagagcttgtgccctcggtctcttgccttggcacctgggtggcttgccacccacaagtgggcatctccgttggacacagtaggttttgaaatccttgtttatcctctggggtctgggtcttggcttacctgttagctgcagctgaaagaggtgtctgctaaggcattgccacctgtggtgagaagaagggttcagcagagtgaaagtagctggggctcagagaaaccaggaaagtctgactcttagaaactatgggtcagcagatgggtgtcctcaggggtaaatgggccatgccagtagacattgcagtggactggaagaaggtaagggatgccaggtatcccatgttctgtctcagctctgcagctgaagatttgggccatgggcttgtacggccctgcagcaggggaagggtatagaggaatggctgcatatcaggaccaagtccatgtcatcttcttaggcattgttaccacagatggaggattctgttcagagactggcctggacacatgggagggcccaccccattcttttaaaattattttaagagaacagtattagcaaaggtggtacatgttttattctgctagaatgtcttactgtcacgttttacaatgtatctcttaggaaacggcaagagccatccacacaatgtggatttaaaggggactctattataatttcagctttcctacgtcttcatacaaaccatcttctctgcaaacacacaggcaatatctctgtgttcatttctattgggagccctgtatgcaaggtggagagagccacatttccccctgagatgttatgtaaaagtttgaggttgagatgacatatctgacactctgttgttactctcagaagctactacatgtgaaattctaatgactgcattatcctgccaagtgaaagaggcaggcatgagcaaggacagttaagaggggggagagcctcatcatgatggggagtcttgttctgacatcttgggaaaaactgtccacagtgtgaagtcatccacttgttgtcctggtttacagtttgagcatctgttgttatggtgtcgaatattttggtgagttctgagtggctcatgcttcacgtacaagggttttcccatgaaatttacattgagttgtccacctccagcttatagggcttctggaacagagtgggtcttgctcttagtgattccatgggagaaaatggaattggaggtactagtagaattcagggaactgtccagtctacaggtggataataaaaacacagaaacaatgaacagagctgcagtctcataacaggtatactacagtttttattttccacataatttttccctctatgggcatctctacttttaccaatgataatttcagtagaataagtttgtttgcaaaataggtggagtttcttcaaatgtggtctgattgtttacataagtgcagcaagagtagcaatggaccatgtaggctgtcttctaaaattttcttttctctaagtttttataaggaatctgagattaaatcttcacaaacctcttgagaataggaagccaaaccaaggctgacttcagactttgcctgcagttcatattggttcattctatctatgtttttaatataacatccgaatcaaagcattggtaatataaccaatgatttcaaatgtgtcatgttacaaagaaagcagattgttactgtacttgtgcaaatatgtgtattaccataaacatatcaattctcatgaatagttgcccaattctggggcagtcaggtagaaagcaaaagtaaatgtttcaattacggttcccagaagtatagtttattgaactgctataagctgtagatagattaaaagagaaaaattccatcaatgtagaaaacaaaccatttaaagaatcagcaaattttcaaataaaaatcataaaaacattatcttcattattatcaattatttcaatgaaatcaatgttcttcctgcttggtctaggctgggaatattatgaagatatcagcctgtttgttaaagttttcgaagttcttagacaaatttggagggttcaggaggagaatttgggatttgcttgtgcccatgggacacaggctgggaatacaattgttttcctgactcttctctgaatgccagatagactccacctaaaaccctattgccaacgatgctgggatccacttaccagagacttcgactgtcatggatttggagctttccttgccagtggctgagttacgaacagagcaaacatagagcccgctatgctttgtagtaatatggcggataaagagcttttgtcctggtagctgaaacttttcattaattgtccaagaatactgtgccggtgggttagagtccgcagaacaggacaagtagaggacttctcctgaacggtaataggtgaatgaagggtaaattctggggaggtctggaccatctggagcaaagagaataaagccacaggtgatgtcatctgagggaaggggatgttcctggtctcttaaagggacacagtgaccctctgagccaagacacaccctcaagtcccagcccaaccccctctatgttcactgagccgaatcctgaggtattcccctgtttctcccatcacaagctgtgggccccaagtctcccatgataagagcatcccctccccttatattcttggttaaggctgtgcctacccaggatttcccagggcagggagtcatggccagctccgatgtccagaagtaaaggtgtctatacttggaccggagagagactgagaggcctggcatctggtggtttggatttaagctggtgtcctggcccacagaggaacaaaagatactcacagaggacattcagggtgactgggtcactgcggatgccaccatatcggtcccgtatttcacattgatagggtcctgtttcatttctcgtgacactgggtagaatgaggatcctgttttcaatgggtcgctttaccctgggactgaccgggaggctctgaccatttagccaccaaatgtaggtgtagttctcactcttaggttcacaggtgaagtttaagacatccttattctccctggggtttaagttgttgatggtgatgtagggcttgggcagcttcgctgtgtggataacagagagaagattgtcctgtgtggcacctttgattcctccacaggtatccttcaatcagagttggcatctcccacctctcattccacccgagtccttgaaagccaatagctggtgcttttgtcacaagatagatgcatgatgatctaagggctcaaagactgtgaggccgccttctctgtcttagggaagcacagactttctgaagtgtcaattgagcagcagtgttgggtcatggacagacacgtcagtgggagtcacagcccctggtacccttcccaggccctccctaatcagttgactggctggctcaccttgggttccttacctggaatatgcaactgctgggccccttccaaattccatcctactttgtccccctagatgtgatttctctgcagcttccatttcaaaggacattctagagatgagtaataatgggacttccctttgtcctgcaaccctgaagatactgagcagcctggcctgggactggatgtttcagcagaaataacacaggggagaccagaatcaaggctggaggtcagttcagtcatcaggcagtggaggctcaaggtggggcagttttttgcaggtgtttcatgatgacttacttgaaccagtgacctctaaagatagagcagagtgcaaggaatgatctagaaagagtgaaggggacaggcaagagctggtggctttggagcagaagcatgttccctgtcttgggttctttaagtttcctctccttctgcagagggcaggtgaggaccatgtggatctttccagaaatacatgtggacatttgcaaattcagaactgactggtagaaagggtgggaatgaactgctggaaatctggtcctcatgaaccatgtgtgtttgatggatatgagacaaatttggagagaggttttgcaaatattttatttcattggacattctactctctgattccatgggttcaactactctagggacctcatgtaagtggattccagagtgaatatgagaagagactgctggttgtcaggagctgggagtgggtagaatcagaagttgttcatgggtgtgcagtttcagttatgcaaggtggggaggttctagagaactgctgtagagcttgatgcctatagttcacacagattgagtatttcttatgcataagacttaggacaaaaagtgttttggatttctgacattttttgattctgaaatatttgtcatatacttactggtttagcatcccaaatctgaaagattcaaaatctaaaatgctccagtgagcatttcttttcagcatcagattagtaggcaaaagtgggaggtgataagccaaagatattcttgcccttttttttctctcaccacgtttctagcttggtgatcagttttcggtgaattccacagtggccatgctgcactcgtatatttttgaaggccttgggatgtgagaaaggctgattgctattttctatgtcatcagaactttccaccttttcatggttacctctttttctcagtgtttgtgttgtgtcagtcattaataagagcctgtcatgtgagatttaggacagtgttttctaattctgcaaaaaatgttactgtgattctggtaggggatgcattgaatctgcaactcattttgggtaatgttgtctttctaacaatattgattcttccaatccatgaaaatgaaatgtctttccatatattgatatcgtctttaatttctttcagcaatggtttgtagttttcagggtataatcatttgacttttttggttaaacttactccaaaatattttattccttttgatgttaatgtgaattgaaattatttccttaatttcctttcagattgttcattgttagtgtatagtctaaagaatgatctagaaagagtgaaggggacaggcaaaagctggtggttttggagtagaaacatattccctgtcctgggtttttgattttccctctccctttgcagagggcaggtggctcttccctgatagctagatagacttcactggaaaacatattgccaatgctccagggatccacttaccagggactatgatcctcttgattatgagatttgttccaccagtggctgagttatggatgaaacagacctagatccctgtatatgttttagtgatttggggtataaagaacacttgtgttgattgctggaacttcccagcaatcagccaagaatgctctgccagtggatggagtctgtgaggcaggagagcttggggacttcccctgtatggtaataggtgtatgaggaagaaatggtgggggcatccaggccatgtggagtaaagagaataatgtcacaggcactattgtcagagggaagggaaaatcctggtctgtggaagggccacaatcacagtgaccctgtgagccaagtcacaacattgaagtcccagccaaatccccactgtgttcacagatctggagcctgagaccttcacctgtttctcccatcacaagctgtggaccctgagtctcccatgacaggagcagcctcttttctcctattgttgatgaagcctaggtctactctggtttgcctggggcacaaagtcatggccaggtttgatgtccaggggtaaaggtctctgtattggacctgagagggacagagaggcctggcctctggccacgtgtatttgggatggcagcctggctcacagaggaacagaagatactcacggaggagattcagggtgactgggtcactgcggctggcactcactgggttccgtatttcacattcatagggtcctgcagtatactttgtgacacccaatagaaagagggtcctgttggtttcggacagcttcaagctgtgagtcatagggaggctctgaccattcatccaccacaggtagcttgcgtctggagtctcagggtcacaggttaagctcacagcctccatggtctccctgggatttaagttgctgctggagatggagggcttaggagtctccactgtgcagaaaacagggtgaagattgccgtgtgtggcgcctttgattcctccaaaggcatttttcaatcagaattggcatttcccacctctcagcccacccaagtccttaaaagcccatggcaggtgtgtgtgatacaagacagatgcatggcaatctgagggctcagagattgtgaggctgcctgcttcatgtgggagaagcacagactttctcaagtgtgaattgagcagcagcattgggtcatggaaagacacaggaccagcagtcacagcccctggtgcctctgtgtgtccctccgtctccaactgcctgcctggcccaccttgtggtcctcacttggagcatgcagtgctggaatcttgttagtttcagtctcactttgcccactgaggtatgttttctctgcagcttcccttgccaaggacatcctagagatggatgatggaacttcccattgtccttaaaacctttgggtactggaaagcctggcctgggactgggtattctagcataaaacaggggagaccagagtcaagcctggaggtcagttcagtcatcaggcagtggagccacgaggtggggcagttttcccaggtgtctcatagtgactgagttgagctagtgactctaaagatagagcagagtccaaggaatgacctacaaagagtgaaggggataggcaagagctgatagctttggaccaagaccatgttctctcttctgggtccatgatgctcccttccccctgtagagggcagttgaggaccatgtggatctttctagaaatacatgtggatctttgcaaatgcagaactgactggtggaaagggcgatcatgaactgatgacggaagtctggccctcatggaccatatgtgtttggtgaatattagaccaatatttgggaagaagtcttgcagatactttctctcattagacattctactctctgattctgagtttgactactctatgtacctgatatcagtggattccagagtgaatcagagagtagaatagtagtttgcaggagctgggatcaggggaatagggtgttgttccgtgggtgtgcagtttcagttatgcaggaagaggaggttctagagatctcctgtacagcctcatgcctatacttcatacagataaagtgctccttatgcagaaagcttgaaactaagtgttttggatgtctaattatttttttattttggaatatttgcagtacatgtactggtttagcatcccaaatctgaaaaatttaaaatccacaatgcgccagtgagcacttctttttagcatcacatcagtggtcagaagtgttgagttttgagcatttcagattgtggatttctggatttccgatgctcaatttgtaacagtgtaatttttccgtaaaaatttgtcaggagtttagacctcatgttatattctgactctagtaacaaaaaaaatttggaggaaacattaaaatgttttcataagtggaaatttttactgatggtccaaacatctaagatcaattgctggtagtagtatttctcttgagaccaaaataaggtttaggtgtgccgtgaattccagcaggatcacgttatgctcaaagaaagatgccaaaggtgatttgaaattagcagctccttaagtagagagagtcccattgaaaggaccgaactggtcagtgcatcaattacataaagggagaaaggatgtcaaattaaaagaagtgatgtgtgttatgttagtaaatatagaaagaactccctgcttctaaattctgtgcagagttaggaaaaatggggaggacctcaaaacaggtatgtgaaatgctttcttcattttctcttaagctcaggaaacaccactagagtttaagtttgtgtgaattaggaagagtctaagtgagatggcaatggctcttgtgtctccccacacgaagatctccaacttatgaaaatgacatcatcatgaggaaacagttataggtggcacaggcagtaaaaccatcagataacacccacctggtcaactccaactagtccccaaaaccaccggtattcccattacgtgtacattacagtctttgtagttgtcccacagctacaaaatttaaaaattgctattgtcaaaacaaaatattaaatatgaagttgaatatgttgttccactttttttccccactctttttgaactttcctgtttcagttttggaagtttctgttgacacatcctcaagctaggtattctttccacagctgtgtgcagtctaccagtaagcatcaaaagcattcttcatttctctaacagggttttttttttctgagacagagtctcgctctgtcaccccggctgcagtgcagtggcatgatctcagctcactgcaagctctgcctcctgggttcacaccattctcctgccttggcctcccaagtagctgggactacaggggcccgccaccatgcctggctaattttttgcatttttagtagagacggggtttcaccatgttagccaggatggtctctatctcttgaccttgtgcccgcctcggcctcccaaagtgctgggattataggcgtgagccactgtgcgcagccgtctctgagggagtttaatgagttgttgccttttgagtttgttcagctttttacttagtgttagaaccgagtgacaaatttcaagcttgttatacgcctgtcaggaagctagaactctctagaaagtgaccggagaatgtgagctccatagcaggttgaggatggcgtcatgagtgaggatggggtcaagagtccactcagagatggagtgcccagccatctctgagggattttaacaagttgttgacttttgagtttgttcagctttttacttagcgttagaaaccagtgacaaatttcaagcttgttatatgcctgacaggaagccagaagtctataggaagtgactggagaatgtgagctccttagcaggttgaggctggagtcacaggtgaaatgagcccatggggtttggggacagcaggcctgtccagcctctgacaccctggtgagtcagtgcagagattacaacagtgacagcaaactagcatggctgactccatctggcatctagtctcaggctggctgtcctcactcattcctgggcataggccaggttaaccttgggaggaatttagtttatggtttaaacttgaagcaagaatgataatagttcctccataaaactaacacccttactttgtccagggactgcctttgtaaaactagtgaaagaccatgagattaagattataggagggaactgaattttgctaaaatgtaggcacagtttctataatccctgactgctccagtgtcattgggacagggtttacaaaatttgtaactaattgctcctatagataacatcactattgtagaacgtgagattggtcttttgagatgtttctcattcttttgcattctggcaaccggctgacctcatccatacctatgactaatggctcagccagtcatgtggtccctacctagaggcagattcaagcacaaacagatcatgtccccctgcccccatgattccatcaccaaacaatcagcagtactaattttttagtcctgtggccctgaaactatccttgaaaatctctaagccctgatccactggggaggctgatttgagtaataataaacctctgtcctcctgtttggcagacttggagtcattaaaatctttctttactgcaaaccgccatttcaattattttattttatttatttatttgtttttttttttttttgtgcaggaggccagaggaacttgtctggcaattatgagagtggatggaggaactgcctatccctgtcccatggtcttgtccacaggtcagcctcacaaagggaaagagccctggatgggaatacagtggaaggtcattctcttagtgacctggggacattggctcgagaggaagcctggcaggagtggcaactccagatgatttctgtgcctttcctctttcctgggaggtgggccaggccacagtgttagtgggaagggaactgaacagccagagtggttagagggagtgtctagggaaggcctagaggtggaggaagaagctgtgcaggacagggcttgccagtcagaatgaagtgggaggaagatgagggacacagagaagcagagagaggcagatacaccatggcagtgagcagtgagggagacactgtcttcagaaactccagggaccaggtgcccccagttccatagtccaggaccaaggagccctcgagaaccctccggtggcttaagagcttcagaattacatgaggtggggtggctttaggggcaagaggtagtggggggatgaaacatggatgtcagcctctgaaggacaagggacaggtgtggctagaacctcctaggattctgcatccaagatccaatctctaaagaggttttggatcattcatttcttcattccattccttcatttgtcatgtgagagctcctgagtgtgtgtctctctcgctgggcctgtggtggtgtagagtgtgagtggggaaagaaaacaaggtcctctccttgatcctctcatgacagtgacaaggacactttgggaaacacaggatttcaggttcagtgatggtggttaagatctgaggaggaggcctggacatttttttgcactgactctgatggttgaagcaggtgatttagttctggagtgcagactaatcagctgaccatttgctctcactcctctgaggtttggatgcctaagaagagaggatttgagccaacaaatgactatggggtgcttggaacccagtaagccctcacttctggtggagtagaggatgggcctgtggctacagacagacctcatgtgaccctgatctcccctttgtgtttgtgtgactcttgctcagtcactgtgccttcctgtgcctcagttttctctcaatcaaataagctaaatggcaaatggactgtggcttttcatgctatctgtgaataaatgttaaattattcacagtcacctgacctaatgcttggcacagtggaggtttcacacaaacagcatttattattaatttgcttccatgagaaagcacctttacgtcagatccctgtggacaagctgctacctggtacatcttctctcttctgtttctgcttctggggacattagtctttctatggactatcctaagcctcctaaggcagttgggtgatggcctacaaagcttgtctttctgtcctctccactctgagtatcaggtgaagaaagctctgtcctggcccagatgaggctctgagggctgagccctggctggtgaacagctccaggagacacagtcctctgacagctggtaaatccttggtcccagtaagccctgcccaagaagccacaacccagtcccagcacaggctcctcagctttatctggaacaaggatttagggacaagggtctggggttgaggcttctagggctgagcttctctgagagtatctcagggggcccctcaggccaagccctactcagttatccagggtctttctcagggtcaaatttatgaagagggcatgaggtgcttggctgagactgatctcctcctgctgagtccccccatcagactgtccttcctctgcagcgagtgtctgcagggtctggatgcaggaaaggaattctgatctgttgaaatttgtctcctctgtgtgtgtcctgcactaaatgcccaaatcccagcatgggacataacgcagtgagtgacacaggcagagtccaggcctgacaatcctgtgtgtgtgaagtagaagtgacccctgtcccccaacacccagggatcatgtggaatcacttacggtgtaaggtgaaggtgaaacgtccagttactcctctagtcccatcatctccctttatgatgtgtaaggtgtaggatcctgcgtcctcccgggtgacattctggatcagcagggatgcattggaatatgctgtttctcgtccactatatgcaggcccatatataattatttcaccgtctactacatatgatgtaatgtaatggtagaggtccctcatttgccctttgtaccagatgtagccggtaagattctggggcaaattgtggacaagtagaagaacatccttcccctcggaaactttggttggctcggcttcaatcgtgacttgggcagtggtgggcaggttccagaagtttaaaagtgatgctaggaggtggagagaacatcagtcaatattgagacctatgtattggtgtgaaaacatggggccctgggtcctgagaaggtctcttcagtcctcagccttgacaacacagacacacacacacatacaaacacacacacacacacacacacaaaagcggcatgtgtgattgtgtgtgtgtatgtgtgtgtgtcctactgtcctactaggtcaaggtcagcagcatgacgcccattccttcaacacttctgacgttggcatttttctgtttggaatcctcttccccaggggtccgcatggccccctccacaatgccctcaggtcctgcttacatcagggcatcgttagacttctttcctgatgcctgcttcagagaccctgggtcttccctttctgacctttccctgctctgctccctccagggttcttgtcaacacctgacctcacattctagatctctttgcatgtctgtcttcccccccatgacagcgtgagctccgtgaagacagggacttttgtgatcttggttgcaccccagtgcctggaacaggctgcagactcctgtagatgtgagagttctcagggccctccatgccctgggtgttttttttcccccaattgttgaggtttcttgctgaggacagtgtttcctgccctgtttatatttttatttgaggtgtcatctgctatagttattattatcatttttcaaaatatggtggcccctgatgattaatcaggaaaacagaacacttaagattttcctacctcttaccaattccggtccaatacgactttcctgttttgacccctgtccctctctggtgtattttcccctatccaggctccaacagagccttctttcctttttttcttttttctttttttttttttgagatggagtcttgtactgtcgcccaggctggcatgcggtggtgctatctcagctatctgcaacttctgcctcccgggttcacgtgattctcctgcctcagcctcccgagtagctaggattataggagcacaccaccatacctggttaaatttttgtattttcagtacagacagggcttcactgtgttggccagactgatcttgaacttctgatctcatgatccacccacctcagactcccaaagtgctggcttctttcattttttagaaccccatcctctccaggagaccccatccagtcactctgcttcctcctcctgtcctctcccaggaagttctctcctcacctgtgagcaggagccccttccatttgatgcgctgtgtgcagggaggggctgagagggttcccatggtctctgctgcttgtgtgttctcctctgtggagataagcctaggatccagaaactctctgagcacggctgtcagctgtgctgtccttcctctttctgtgctgagcctcttcccagggcaggagcaattctcaagctcatgggcagggtcaggcccaggacacctctctgtcccctcctctctaagtcctgcctccttgtccctccttctgtttctccttttgtctgtgtttcaggtccctgggaattgtggcggcctctgcctttttcagcagtgattctttcaccaaacctcaagacacactttgtgcagacacacagacacacacacacacacacacacacacacacacagaagagatacacacagacccacacagtcagacacataccctgcaggttgggcaagaacagtcctgggcctcagcctcctggtgtccccatggctctgggtcggggtgcaaattaacgccctttggcctctttcatccccatcaggctctccccttcagtgcaggaggctggagctgtaccaggtccctgtcagaatgatgccccattgtgctgtgggtgagctgtgtgttgcctggtgagagggacccttcctttctctaatcatgtctagcttggctgcagcttccaaggatggacattcaggacctgggtgtcccagaggaaactgtcctttctggcggtgtgcagggtgaatctctcatgcctcttgggaggagaggcctgtgctggttgctcagtgggggctgtgagtcccatagtcaaagggacagttctctgtcagtctatggctccctggggtctggcggctgagctggagctcatagtttctcatgttcttcctgaccatctttgatgtcctctcttctctgcccagctgactgtcctgtggtcaccacaccttccctgtggtggtgcaggaggaagtggggagttacccaggaaccctgcgggacatggctcattgagatgcgggagggggagcctgggacagagcaggggttcagagctggagagattcatcccaacttactccgtggccatgatgggctcagccctccatatgctgacatacccaggggtctgtcctgatggttttgacctggccaagctgctgtgtgtagaggaggaacaggcagtggccagagagcctgtctggagggacattgctctcacctgagagggcgggtgggggtgagttgtgttctgagatcaaagagcaataacattccccttcttcccgcaagcacacaggagaggtctgtcttcccaagggacagctggtgttaggtggccacatcccggatggtgcctgtgtgtgaccatcacacgcgctctgagcccccagggtgcagcgggcaggcaggtcacagggtgcctggctgattcccggggaggctgtgggccctcaggcagccgctgttctgtgtcagcgctaggcttggcctgggatgccccagagaacaggacagatggagcaggggtgggcatttagggagcagtgccagaaagagttgatgaggatggagggaggtcacgaggggaaagcacccggtgtggcatcgcgtgcaccagcgctgccctgggagatgcctttagctgggcccagggaaggagcaggtgtgtggggaggagctacctgcagggggagtggtgttaggttggcggccgccaggtcagggaggagctgacagtgtccgtgtggggagcatggagggcgctgaggacttgggcagaagtgaccctgtagagggtggacactgctgggctgtgggttccgctgagtgaggttggcatcccctgggaagactccaggctgggagggactctgtccccctctggtggacagggagggaagtgtgaacggcagcaattccaggccaggatgcatgttttattccacgtggatctgcacagttcacacgaggtcacacctgtgttatgttacagccccatcaccttccagccccgtgagtcccagtctctgtggctctatgttcactgttctccctctttcacaatcagatgtcccaaatgcagatttttgtcaccttctgtgagtttgtgtttgtgtgcagtaggcggcactgtgtataccctgggggcagtgatgtctggggctgagcactgcagttgggcttgggagcagcagggtgggaagatcaatgtcaggggggcagggacaagtcattttcattttctcactcccagggaccagaacccaggattctgactccagggcagagtaccacaccctgctggtgtccctggatgtcatgatgctcatagtgtcatgttgccttggcattcattttttaaggtgtaagtttatttgcctcaaatcagaggcagggcttggtcaccatggcagttttcaatactgtgtctggttcaagtggctccagttggtgtccagagatcaaatcttagagacatctctcctgcttggtgtgctgggctcccgtctctccagctgctttctttaaactgataattctgacattcgccctcacattaaaagtgaccacctctcagtcacagcgtgagctcctgttcccagtgtttgctgcttgctttgaacacatccattaaagctccctgctggaaacctgtcagataacaccctggacttaataaagccattggcttaccggtctcttctctcctccctccctgggctcactgacctctgtgtctgtggtctccaggtgtgccaagtgcttcccagtgtctgtaagtagtaaaaatacttacactttcacgttgtggttgtattgctgtggcctcacatgccatccagggcctgacattgaggctgccttatgggacctgtgctggctgagcccctgctggagctcttgttttggggcctctggttctcttggggacaggagcttccagctaacttgattgaaaaactgatgcatttcattgaaaacactgggtcagatgatgtattcataggcttcagctcctataacaaacaccttagcctgggtgaattaaataatagaaatctatttttcacagttctgtgaataatgtgctattttaaccactttaaaatgcacaatcaatgaaattaaccgcatacaccgtgttaaattaccatcaccagtatttttcctagaaaattgttatcattttaaactgaaactttgtatcttttaaacaataactccctgtatgttccaccctaggccttgatcacctctactctgtctctatgaatttgcctattcttgatgtttcatataaatggaattatacaattatgttattttgtttctgacacatttcacttagcataatgttttccaagtccatgcatgttccagcgggtgtcagagcttccttcctctttatggcagattatcattctgttttatgtgtcaccatatttgtttattcatgtgttgatgaacacttggattgttttcatattttatcttttctgaataatgctgcaatgaacattcccatgcaagtacctttttgagtccgtggatttaattctttgggtatatacctaggaatggatgttatttcaaatgagaattctataattagctttttgaggaacagcaatactctttctcctagctgctgtacttttttatattctcaccagccatgtatgaggattccaaattctacataatgctgctacttgttatttaacattttaaaagaacggtagccagttttgtaggtttgatgtggtgtctcattgcagctttgactttgtattttcctaatgactaatgatgtttagtatcttttcatgtccttcttgactatttgtatatcttctttgaagaaatgtatatttgagtcttttgcccatttataaatttaatggtttctccttttgttactgagttgtagctagttctttatattatctggacatgaaaactgcctatatgtggttgtcaaatattttctctcattctgtgtctattaattattgtcttgataattttctttgatgtacaaaaggctcacatcttgataaagcccaatttatcttgtttttcttgtttctcatgcttttgtatcatatctaagaatccattgcacatttgagttcatcaatatttacctctatgtctattttaagatgttttataggtctgatatttaactcactgatgaatttttcagagaattgtttgatatggtgggaggtagagttatctaaattcactgttttgcatgtggttatctagttgtttctgcattatcattagaaaggagaattgttcctccattaaattttcttgacaccctcttcaaagagtaattgaccataaatgtgagggtttatttctagactctcaattctatcccatttttcattatgtccagtcttttgccagcagcttgttttaataattgtactcctttgtgagattgcaaataagaaagttcaagtcttacaatttcttttggcaggattgttttcactattcaggggtacttttttgaaagatggggaggacaaagtttcacaattgggaaagccgtttctgtcttcttcagggggaaatttgggagaagcttttaagaaactttatctaagtaggtaaactgtcaccactttatttgctgaagtgctatgttaaagtgtgcattgcctcttgtggaagaattttggaccctggaagcacttgcccacgtggtgagagacagtgaattccacgatgaggggcagagatgatgttgttttgtgatacagtgttgttgggggagttgtatacatctcaacttctttatgtctctgtaaagtgggcatagggagcagcccgcagggtcggtgggtttttctccccgtgtgcagagacgtgagattgtagaaataaagacgcaagacagagagataaaagaaaagacagctgggcccgggggaccactaccaccaagtcatggagacagatagtggcccttaatgccaggctgtgctgatatttattggatacaagacaaaagggcaggataattagtgtgagccatctccagtgataggtaaggtcacgtgggtcacgtgtccactgcacagggggcccttccctgcctggcagctgaggcagagagagggaggagaaagagagagagagcttacagcattatttctgcttattagagacttttagtactttcactaatttgctattgctaactaaacagcagagccaggtgtacagcatggaacatgaaggcggactaggagcgtgaccactgaagcacagcctcacagggagatggtcaggcctctggataactgcgggtggacctgactaatgtcaggccctccacaagaggtggaggagtagagtcttctctaaactcccctggggaaagggagactccctttcccggtctgctaagtagcgagtgtttttccttgacactgaggctaccactagaccatggtccgcttggcaatgggcatctttccagatgctggcattatcgctagaccaaggagccctctagtggccttctgtgggcataacagaaggctcgcactcttgtcttctggtcacttctcactcttccctgcttccctcttccaaccacttctgagctacaaatgagaaggaagcgatctgattaaacaggtgatgagcagagtcacgttctgaggggatttgcacttttaaaaggagattaatgaccacatctgacaatgtcaccctggaatcttatgcagagtgacaggggagtggggatgagctccgttcaggttcaggaagcgagagtttggatctgaagtacttttcagatgctgaagtcataggagcttgcagttgcttcctgggtggagccataaacaaacatctcttctgctgagtggggtctgagaagatagagggaacggtgacccaggagctctggaattatctggctgtgttacacttgcaggactacacatatttaagtgaaaacaacatggttttcatccacctggctgacctcttagcctgctttcctcttattgttccctcgaaggcatcattttttgaaagagaaatttaaactctgtccatctcatcccctttggacaaaagttgagtcctttctgagctctttcatcatctggagtttaaaagcttcccctcctctgttaactctctttgaatccctcatgtcacaccaaacttcaaaagagacaaatacttttgcatgactccctgcaggctccgttttgccctgtagtgacagccccatgtcttggctttcctgattggaaaaacttctcaagctttctgcattcatgatctctgcttcttcagtgcaaccttctccagcttgtctctgatctccaatggtccctgcattaatcctgtccaagccacaggtgaccctcatatcatctcagcttctacttcccagtctctctctctctctcttttttttttgagacaggggtctcactctgttgcccaggttggtctcaaactgttgagctctaaagatcctctggcctcatcttcctgagtagctggtaggggtgtgagcccttctgcttggtctccagtcctttgcttttcttttttgacctatacaacatttggtggttgatgtccatgttcatgtaattgtcttctctggcttcttggggccaccatgcattcccttctccctcttttcatttattatcttttcatctagtaagacccatcttcccctgaatatgtatattttcctcaaagcaaggattggcttaccttcacaaactgagtctccaatgaccacataaactgaaatgcaatagaaatcatggacagatgtgagctcctcttctacttcctgtgtcctctgcaggttcttctcaccaacgtcacgtattgttaagtaagccagtgatgttaagttagaaagtggactgattccattaattcatttggcatgttccgaagtcctcacctgagatctatctactctccaaattacacttgttagtaatacaggaagatctttttcacatgagctaattagggtgaatacatgtaagtgttggtaagaagtactagaaacactggaatttgtgagatttcattgaagaaccaacttccacccagcccttcacattgttctcttttggtagtttcttgtcatttcctccttttattatcaatagagctgctgtgaacatgcatgtacaagtttctgggtggacatatgttttcattttttggggggtagacatcaaagagtagaattgctgggttgtatgatgaatctgtgttccaacttttcagaaactggacttctactccttcctgatttcaccttccacgccatttctgtagtgaggcccactccttggccttataagacctgaattaagttaggtgcccagagccgttctgtcattgactctgttctttcccttgctagcctgtgtaataattggcaatcagacctttacgtgcgcaatggtttcatatgtctccccaactatattacaagttccacgggggcagggctatgtctatctccttgacctctgtatctgcgatgcctagcagagggctgtgaacaccggtcaccctccataaacactgggagacaaacaagggagtcagtagagttagtttttttgcctttttacccccagaactcttagaatatgatttgagctattgcttcaaggaagtcctggggcagatgatcattcatagatgacatgagggagtgcacagcacatgagtttgcaggaaaatgcaaaccccacattgaaatttgatccccaatgttggagatggggatctacatgggggtgtttgggtcatgggggcggatccctcatgaatggcttggtgctgccctcatggtaatgagtgggttttctactcaatcctgcaagagctgattgttagaaagagcctggcaccttcctctcctctttctcttgcttcttctctcaccatgtcatctgtgcacacagcagctccccttcccattccaccatgagtggaagctccctgaggcctcaccagaagcagatgctggtgcaatgcttcttgtatagcctgtagaactgtgagccaaataaacctcttttctttataaattatccagcttcactcaggtattcctttttagcaacacaaaactgactaagacagggtatcaggagacctagctttgcctgaatctgagaactccatcaggaatcttggaacaatttagcccacaggtccaaggctgattttttgtcacagtgaagttcaggtagtaagaattctcactggtggctgttgacggtggcggtggtggggatgggtcatatggagaattagcagtgggagactagaaattaaagtggataaagggaagaattaaaagtcaaaaacagtgtgagggaggaaaggaatggatataacacctcacagctttatccttgagaggccttaaagaatctacttaataataatcagatggtattctataagaactttgagactagacatgtgatgacttttaggaaactgccctggagctgaaaatgcatgcaaatctagctgactcagctccagccttaactggctcataacttgtttcataaacatgactgtatgttagcaaggaaatgagagagaataacagcacatcacataggcatgaaaagtatttgcaaagcagcagttctcaacaatgacattttgcagagttttccagaagcagattcagaaaactgaagaccaaagtaatgagggagctgtctcatgcctagatgagcagaagcataccaaaggcttagtatttccccaagtaataggcacctgaaacttatttaaggaaaatactcttcttgatgaaacaggcactgcagttgaagcaggaatgtgtttggtgtgctgccttaaatagcatgggtagatgttcaaacatgttaggactcgctggccctaggaaagacccgcaagtatctggtctacaccaggaaagtgacaatgaaacaccaaacaccttttctcctctaattaccaagaaaagtatttctttcccaatggtggaagacaataatgttgggaatgatgaagttttctggagtgtgaagtggatatgtcttataagtttaatccacagcttcaccacttcataagtggataatcgaattgtgcctcagtttcctcagacttggggatattaagagtatcctcagtcaccacaaggtgggtaccaacataagaaaagagtgtagcaaaagcccatgggtgcatgttcttaaagtgcctagtgtgggattagaatgacaagtggtagatgacctacttgtgcagaaatttagagttattttgtgattttcaaatgatcatgtgtgctttccatatgctgtccagactgggggtgctgcagctagaaagggaagaaggtttccatatttcctgagactggagtcacatcctctcaccaatgcactcacctgctgactaaccagtgtacttctgggaattgcaaatgcatgaaatggcacccattctagactagtcacggcagtgttggtgatggccacagatcgggaacgaccctgacgtttatccatagggaactgggtcatgagccatgatccacatcatggatactgggcagctgtggcaaagaatgaggtatctttcttctgtgtactgggaaaggtttccaagatataccgcacagtgagaaaaacaagaagcagaacaatgcacggtgtgctacctcttacattacataggaggaaatgtaaaattaatttaccaatggccaataagcacatgaaaagatgctcaacatcactaatcatttggaaaataaaaatcacggctacagtgagataccatcttacatccattatgatgattgttcttaaaaaaaagaaaaacagaaaagaacaagtgttggcaggtaggaattggaatgcttgtgtagtgtttgtgggtatgaaatatggcgcacccactgtcatcgtttctcaaaaaattaatcatagacttaccacaagatgcagcaattcggcttctggtgtattccaaaaagaacggaaagcaggggccccagcagatatttgcatgtctttgttcatagcagcattattcacaatagctagatgttggaaataagcccagtgtccatccatccatgaatgaataaacagaatgtggtctatacgtacaaatgaatgggattaaaccataacaagaagggtggttctgatgcgtgcttcaacatgaataagccttgagttctttctgctaagtgaaataatcagactcaaaaagacaaacattgcatgattccacttaacagaagtgcctgacgtcatgaaatgcatagacagaaaatgaaaaggtggttgtcagcggctggagggagggggaaagaggagttgttgtttaattggtaaagaattccagttggggaatatgaaaaagttctgggtggggatggacagtggtggtggttgaacaacaacgtaaatgtacttcctgccactggatgtacagttaaaagtggttaaaatgggccgggcaaggtggctcacgtctaatcccagcactttgggagattgagacaggcggatcactttagattaggagtttgagaccagcctgggcaatatggtgaaaccccatctctactaaaaatacaaaaattacccaggcatggtgacaggcgcctgtaatcccagctacttgggagggtgaggcaggagaatcgcttgaacccaggaggcggaggttgcagtgagccaagacggcgccactgcactccatcctggacgacagagggaatctccatctcaaccaaaaaaaaaaaaaaaagaaattaacgaacgaagagcatctatgttccaaatgcagtgtattattttatgcaggctttcacaagctccaaaagattcaccgtgcagaactggagattctagagaaagaccacgcctcctcctgcgggtaactcttcattcagcaagcagctcttggcttatccctgggcttagtggaattcgaatacctgaccataggacaccaagggctttgggacctgaatgacacatcatgtggtggtgacatctgagttacctggggcgtgcacagcagcctccagcatcccagggagagctgtgtatggggtcaggctcaagcaggtctcagggcaccagtgacccaatgggtgactcagactcccatggcacctgctccttctgtttctcccttcgccatatatatgagctcatgggaaacgctgtgacctcttacagaggaggaaagttcatggacttctagcttctagaactgtgatacaataaactcctgttgcttatctactcctctgcagtattttgtcatggcagccctagcaaactactatagtgactgtgggggttaggatgacaccaagcatcaaatgccactccctgttccaacagtgagaccattccacagcccctgaatgacaagacaggccttcaaactcaagactacctggctaggtaagaagtactttagtcacaccacttctgaactttcttgcctacctgcagggcaggaatttttaccatttttaaatgaggacactgaagctcagagaagtgatgctatttcctgatgggtaagaggtgatatatttcagtcctcagaccaactctggagtagcaaggttctagtcttaagagtcaaacttggctaggcatggtggctcaagcctgtaatcccagcattttgggaggccaaggccggtggatcacctgaggtcaggagttcgagaccagcctggccaacatggtgaaacctcgtctctactaaaaatacaaaaattagctgggcgtggtggcatgtgcctgtaatcccagctacttgggaggctgaggcaggagaatcgcttgaacccgggaggcagaagttgcagtgagctgagattgtgccattgcactctagcttggggaacaagagtgagacatcagctcaaaaaaaaaaaaaaaaaaaaaagtcaaccttgagccaggcatggtggctcatgcctgtaatctcagcactttgggaagccgatgaagtcaggatttcgagagcagcttgggcaacatgctaatacgctgtctctaccaaaaattaaaaaattagtgggtatggtggctcatgcctgtaatcccagctatttgggaggctgaggcacaaggatagcatgaaccctggaggtggagctgcagtgagccaagattgtgccattgtactccagtctggagtgcaaaaaaaaaaagtccatctcaaaaaaaacacaaaaagaataaatatggggcctcatgactgtatattactgggcttccgacctagactgaaagatcagggaagactttcctgaagagaaagtgagctctgatgggcccactgtactctagcctgggcaatgtaatgaggctctgtctcaagaaaaacatgcagaataaaaccacaataagataccactacagaactattagaatggctaagattaaaaagagtgaccatgacaagtgttggcaaggatgtggaggcactggaatgctcacgctactggtgggaatgtaagatggtacaaccactatgaaagcagtctggcagcttctaaaaatttcagcatacacccactatactactcggcaattccattccattcccacattatttttatttaaaggaaaatcaagtggtatgatctttaaggcatttttgcctgacaaatagatgaaatgtgggtagcagcccaacactccctggtaagtcttcacagggcatatgtggactcgtggcccccaggaaatatggctctttccacaagtgctaagtccactctctccatcaatcctaagatgttagttccacagcactgccagcattgggctttgtctatttctttctttctttgtcttttttgagaggggtcttgctctgtcatccaggctgaagtgcagtgatgcaatgttggttgtaatggctcccatttcatttccaattgatcttatttggctcttccctctttttttcttggttaatcttgccaatggtctatcaattttatttatttttcccaaaaatcagctttacattttatttatattttgtattattttgtttcaatttcatttagttctactctgatgttggttattttctttcttctgctggatttgggtttggtgtgttcttgtttcttgagtttctagaagtgtaaccttagattgtctatttgtgctctttcagtctttttgatgtaggcatttaaggctataaacttttagcacactctttgctgtattccagatgttttgatagggtgcgtcactattgttcagtttgaagaatttttaaatttccatcttgatttcatatttgacccaatgatcattcaggagcaagttatttaatttccatgtgtttgcatggttttgaaagttccttttggagttgatttccagtttattctaccattgtctgagagagtacttcatataatttcaattttcttaaatttattgagacttgttttgtggcctatcatatggcctatcttgaagaaagttccatgtgctgatgaatagaatgtatattttgtggttgttgggtagaatattctgtaaatatctcttaagtctatttgctctagggcatagtttaaatccattgtttcttccttgactttctgtcttgatgacccgtctagtgctgtcagtggagtaatgaagtccctcacaattattgtgttactgtctatctcatttcttaggtctagtagtaatggctatataaatttgggagctccagtgttaggtgcatgtttatttaggactgtgatattttcctgttggacaagtccttttattattatataatgttcctctttgtcttttttaagtgctgttgctttaaagttagtttttttgttataagaatagttactcctgctcacttttgtggccatttgcatggggcgtctttttctacccttttaccttaagtttatgtgacactttatggttaggggagtctcttgagggcagcagatacttgcttggtgaattattatcaattctgcaattctgtatcttttaagtggagcatttagaccacttatattcaatgttagtattgagatttgaggtactgttccattcatcctgctatttgttgcctgaataccttggttttattcatttatttattgtatttttgttttataggtcctgtgagattcacgctcaaagaggttctgttctgatgtgtttccaggatttgtttcaagatttggagctccttttagcagttattgtagtgctggcttggtagtggcaaattctctgagcatttgtttgtctgaaaaagactgttatctttcctttatttatgaactttagttttgctggatacaaaattcttggctgataattttttttttctttttctgagatggagtctttccctgttgcccaggctggagtgcagtggtgtgatctcggctcactgcaacctccgcctcctggattcacgccattctcctgcctcagcctcctgagtagctgggattacaggcgcctgccaccaggcctggctaattttttttgtatttttagtagagacggggtttcaccatgttagccaggatggtctcgatctcctgaccttgtgatctgcccgcgtcggcctcccaaagtgctgggactacgggcgtgagccaccgcggccggcctgataaatttttttaaggaggctgcagatgggtatgcatgctcattggaggtgttcttcccttattgaagattattaaaatcacatgtgttgaaaagcatttgggactgtttacttaattgatgagtactcatttatttttacattaattttgataccatgtataaacaatatataaacataggtatggacatatacatatgtgataggcgatacagcatagaacatatacatgtgcacataaagatagagtgcgacagaaatacttcagatttttgattttaaaactttatgcatgaacctataaaactccctgttaaaaaaaaaaaactggatttaaattgtgctattgtaaatataaaaattaacatttatctgaggaagcccttgctgagttttagagagagtaggtagtaaatttacatctcaaagcacacacacacacacacacacacacacacacacacacacacagaagaatttgggtgtgttcaaggaagattaaaagtagatgccaaggtaacacaaaaatgatagaaatttataacaggattttataaggagaccaattttatttccatacatagcttttattttggtctctgttttccaactgtactccaggaaacacactacacaggctcccttcttaagtgctggtgagccactgcatatacagacagcccactttaagggaagaatcaggggagaagagatgcagaccccagaattatgccaacatacaaatgcctaagtcaaaggtcaaactgcacacttgaaatctcatcacctgtttggccctgttttcagtgtactttactttctttaatttctgctctaaagcttttaaatgaactttcactcttgctctaaaatttgcctaagtctcttcttctgccttatgacacttagtttaattctttcttctgaagaagcaagaattgaggctgctgcagacttgtacagatttgctgccattaatatactttagtgccattctacatgatagaatatacatattcttatatttatacatatatataaaatatatgtattcatagaggccttgaatctacattcttgctgcacttcatgtaaacaatccaggtagaagactaaaagttattttggaaatacatttgtcccatatgatttctatttcataaaaatgggagacaggagggggaaaattatttttagaaaaaaacaacagaacaacagttattaaattttagatctgttcatttttttttttgaattttgttatttacctacaatttgggctgaatcctaaattttttcctggctacaaatttcaaaactaatggtttcagaattttcttccattttggtatattataaattaaaactgtgctttttaaatttttatcatttttttattacgcttttaagttctgggatacatgcacagaacctgcaggtttgttacataggtatacatgtgtcatggtgttttgctgcacccattaacccatcatctaccttaggtatttctcctaatgctatccctcccctagtcccccacccctcaacaggccccagtgtgtgatgttcccctccctgtgtccatgtgttctcattgttcaactcccacttataagtaagaacatgcagtgtttggttttctgttcctgtgttagtttgctgagaatggtcatttccagtttcatccatgtccctgcaaaggacatgaactcatccttttttatggctgcattgaattccatggtgtatatgtaccatattttctttatccagtctatcattgataggcatttgggttggttccaagtctttgctattgtgaatagtgctgcaataaacatatgtgtgcatgtgtctttacagtagaatgatctataatctttgggtatatacccagtaatgggatcactgggtcaaatgatatttcttgttctacatccttgaggaatcgccacactgtctttcacaatggttgaactaatttacattcctaccaacagtgtaaaagcgttcctatttctccacatcctctccagcatctgttgtttcctgaccttttaatggtcaccattctaactagcatgagacagtatctcattgtggttttgatttgcatttctctaatgaccagtgatgatgagcttttttttgtatgtttgttggtcacaaaaatgtcctattttgagaagtgtctgttcatgtgcttctcccactttttgatgggcttttttttttcttgtaaatttgtttaagtttcttgtagattttggatattagccttttgtcagatggataggttaaaccttgcaagctgaaactcgatgacttatgtaaacttctggagaaatcatagcaacttatatataaacaacctttgtgcctgctgatgtgtactatacaaaaggtacacatgaacgctggattcagactgcaattcagaaaaatgtgtcagattgccattgcaattagaagatgcttcagaaactctagaaaacctagtctatagggttagagtgatgtttgccaaacgaattgctctaattgaagcagcagttgtgtgactttaataaagttccaggattatactgtccctttgttgctgtgacttccctttgcctttttctgatttgtcttcatccccttttccacggggcatgacttcttaagaatgagccttcctagtgatgtaggatcagatgaaacatacagtcacaaagtcatgtcttctacaatgctttctctgaaagcttttgaagaatcgagggaccaggtgtgctgacacagacctgtaatcccagcagtttgagagtccaaggcaggaggatcacttgaaaccaggagtttaagaccagcctgagcaacaaagggagaccatgtctctaccaaacataaaataaatcaaattagccaggtgcagtgatgcatgcctacagtctcagatacttgggaggctaaggcgggaggaccacttcagcccaggagttcaaggctgtagtgagtacactccagtcttggtgacagagcaaggttgtgtctctaaaagaaaaaaaaaaaggaaaggaaaagaatggggtaagcaggaaagccaaagatctcgggcatctccagatgattccctgaacaaattgttttttcttggcttcaaaacctttcaagatgtatatttctttgtaaaagaaagacatgccaattgtaactttaagtgagcagtcaaaatctagctcctaaaactgaagtattttaactctcattctgataatatttattttctgaggcaaagaagaaagacaagattagatgaattgtttttctgcccacaccatctcttccgacatgccttatccctttaatcaaatgtataaatactaagcctcctgaaacctcttcagagaaaacacaagccacagaggtttttttgcaactcatgtattcccagggtgtactttcaagttctggctcaataaatctcaatttatcaagacccttgcctcagtcagtcattctggataaccaccatgagtcctgcaaagcccttcagtaatctgttgcctgcctaggtgatgtgtaaggtgagtcaggtcttcatgagtcaaacactcgtcttcctttctgtctttcccaaccctaccactcagtgctgtgtgctctgatctgaccccagctcccaggttgtttgtattggtctaagaaagcaagaccaggaggggcaggttgagaaggaagtaagaagtgaacatggaaagtggcaggtggggctgtcattgctcaaagccacacaccctgggtgcattttatgaatttttctggattcataatcttttccctgtgtgtctatctagaaactcacccccctcctactttcttctcattactctttctgtttctagtgcactcgtttatggccagagaatggccgtgtaaatagttgacaatagaataaaaaatgatgttttctgagacttggaagctggcctttcttttttccaaaagagattggggtttctaaaagctagcttttatgcagggctgtgcagttgtgagtgtagttttagggaacagatgcataagtgaagggtgagacagaaaacaaaatgctggctgtttgtcaaatcctgaaagtaaatgggacaaaaatcatttttgaaggaggatgtcattcaggagaccttgtacatcttagcgtgtcctcttaccagaagaattggaggttgaggttgaattatggatttaagtgacagtgggtatataattctctgcctcagtttttttttttaatctgtaaaaatggggattgtggctcttgggattttttggtgagcactatagttacctgaaaagctcttaggatagtgcctggtgcatagtgagtgctgcatcagtgtgagctattataattatgggaatatacaaaggtatcaccctggccatccagagtggggagatattttctggtcagggtccaggcaggccagctggagatgaagctgattagtagggaagcttaacttccaggagtggaagaatttaggaggagtaaacagaatgcacaacattctgcaaacattcctttacccaacagtaggaatactcagagtgggtgtgtcttccgtgacaatcattatctcctgggaatctaagaatgtgttctagagtcaaatggctttgatgtaagccaaacccagaaatgggcttcagggctgccttgcacatagcattcattcatcttgaaaaaggaaagcattcatcttgctaaaggaatcccctcttctggcccaggccattatttttgtttttgtgctatcctaatttttaaggtgtaagcagaaagactgaagaataaaataatgaagtacatgaatgaaataacagggtagaattgagactgctacatgtaagttaagagaaattgtgtataaatttttgtgaacagaaaaaggatttcttgttgcaaacagacctctctatataaataatacctcctgccttgagtggatagcagaccgcatcacaagaacattccagcagagtcatgagagaatggttagtgtggcttctttaattgtcaggttagactgagtaagttactgaagagaaaggagttgaaggagaagatgggtgagggcaagaaaaatgggaaggtgaaaggaaaggactgaaaggaatgtttaccaagggctcatcaggtaccaggctctgtgactaatgtcttacacatgttaatttactcttccactgtcattttctgatgcagtaagagtcagccttacactgcagatgaggaaagaggctgagggaagtcaaatgagtggcccagggtcatccagccacttcatagcagagctagtgtgtttcactgtggtttgtgcagacagaaaagtgagacatggaaggaaggcaaaacatttttgttgtgggtgatgtttatgaaagtgacccgtatgaggcagaataatggcctcttaaaaatgtccacatccgggccgggtgcaggggctcacgcctgtcatcccaccactttgggaggctgatacgggtggatcacgaggtcaggagttcaagaccagcctggccaacgaggtgaaaccccgtttctactaaaaatgcaaaaattagctgggcgtggtggcgggcaactttaatgccagctacttgggaggctgaggcaggagaatcatatgaacctgggaggcggagattgcagtgagcctagattgtcccactgcactccagccggggcaacatgagtgaaactgtctcaaaaaaaaaaaaaatccacatcctaactcttggaacacatgcatttacttttcttggcaaaaacactgttcaaaggtgatgaggttgagtatcttgagatggaaagcttattctggcttatctggatggctcccagtgtcatcataggggtccttgtaagtgaaagagcaaggcaggagggtcagggtgagaatgatgcagtctgagagactccactggccattgcttgctgtgaacatgtgtgataagacaaaattacaactgatttagttatagatgtaattggtttttatttgtgatttatgatttggggcagctctccctctacagatgcctcagcatcccaagtagctgggactatattgtgggatctggccagcaacctgcaatgcaacagggctctttctttgttcccaggcagatcggcaagttgagaaataaaggacacacacaagatagggaaagctgtgtccaggggtgtcaccgccttctggtcctgcgatgctgccaatgcactggatacaccagcatttattattaagtttagtgagagtgggggtagtttagtgagggatttagggtcatttataggctctccataagggtcacattcctttcccagagctacagacatctgcttttctgggataggaatcttggtaatgtgaaacctccctgactgcccatccattcataggctctctgcagggggaagcacatcacgtgctgttggctcattctggcagtccaacctggcatttttctttacacaatccttcatgcaattttgtacttacaataatcaggagctttaaaggatgtcttgttatgtaaaaatgtgttggctgggtgcggtggctcatgcctgtaatcccagtactttgggaggctgaggcgtgtggatcacctgatgtcgggagttcgagaccagcctgaccaacatggaggaaccctgtctctactgaaaatacaaaattagctgggcatgatggtgcatgcctgttatcccagctacttgggaggctgaggcaggagaatcacttgaacccagggggcggaggttgtattgagccaagattgtcccattgcactccagcatgggcaacaagagtgaaactccatcttaaaaaataaatgaagtgtggttgacatgatatatctgacactgttaacttactctcagaagctacttcttgtgaaatcctaagtacagcattattctgggaagcaaaggagacaggcataagcaaggagaaattaagagaggtaagagtctcatcatgattgatagtcttgttctgacatcttgagaaaagctgtccacagtgtaaagtcatcaacttgttgtcgtggtttgcagtttgagtgtctctaagttatggtgttgaacatttggtgagcttttagtggcccacacctcagacacgagggttttcccatgaaatttacattgagttgtccacctccagcttatatggcttcaggaacagagctgctcttgttcttaatgatttcattggagaaaattgaattggaagaactaaaagaattcagggtccagtccagtctaccagtggattataaatactcaaagataatgaacagtagtggttcaatctggtaacaggtgtactacagtttttcttttcaactagtttttctctctataggagtctctaattttaccaaagataattccagtaggatgaatttgtttgcaaaataggttgagtctcaccgaacttgcccagattttttacctaagtgcggcaagagtagccgtggaccatagaggctctttttaaacgtccctttgctagaagtttttaataagaatctcagatgaaacttccaaaaacctcttgagactaggaaactaaaccaagaccaacttcagactttgcctgctttccctatgggtttattctaggtatattatcaaatataacatcccagtaaaagctttggtaatataaccaatgttttcaaatgtgtcctgttataaagagagcagattcttactgaacttgtgcaaataactttattaccataaacctatgaatactcatgaatagtttcccaattctggggcactcagatagagagcaaaagcaaatgtttcaatttttgtttacaaaagtatactttaccaattgctgaagaaaaaaagttcataaatctggagaataaaacattccaagaatcagcacattttccaataaaaaattatgaaaacattatccttttgattatttagtccaataacattgagtttttttcttctttgtcttgaatttcatgaaggtatcaacctgttctttttctcagtgtctctattgtggcagccattaatgagactctgtctggtttccatggcagggacctgattgacagaaggcccaggtcagcgcatttcaaattcactacctcctttacagagaaagcttctttcccacaggctcccagcaagggtgtgaaagcaagtctagttctccgaggctctctttaactccaatgggtgactggttggaggattcctcatcagccttgcaaaaactcttagaactgcattggtacctaaaacttctttctctttctttttcacaggaatcagctctgcatagcggtctgtgggttctcccatactaccttcatgcctgccccacattccctcacaggtgtcttccctgataaattatcttgtatgtctaatcccatcttggatgcatctcagttggtaaaaactaacataccagacttgattctttgcacttagctttttttctttctctcccacaattagtcagtaaccatgtcctagtgttttatgtgttaccgcttttttcatatctatggaaaaaggtaggtactgttgaggtgcactttctatgtgccaggccctgtgctcaatactttacctgtatctcatttaatccacacaataaccctgtcaggtaggcattatttccattttgctgatgaaaagacagaagcttagcatggtgtaaaaactttcctggtgtcatatggctagtgacaggtggatctgagatttgattctaggactatttgacctcaaggctaatgatgatggtagtaatatagcagctgacattggttcctctttgtgtggcatcttgtttcattgactgcattaaacctttaaaagaatggtatgaagaaagtactcttattgcaattttcaggtgaggaatcaggggttcagagaagttgagtcttgtgcaagaaatttataactgtaaactcttacattaaaaaagaagaaagagctcaggtcaacaacctactttaatacttcaggatacgaaagaagaacaaactaaacccaagcacagtgaatgagggaaataataagtattagggtggatataaataaaatggagaatggaaacagaatagaggaaattactgaaaccaaaagttgattcttcaaaataaaatcaacaaaattgacaaccattaactagattggctaagaaaaaaagagaaaagataaaattactcaaatcataaatgaaaatggactctgagcatggtgggtcatgttttaatcctagcactttgggaggtcacagcagaaggatttcttgaaaccaggtgtttggaccagcataggtaacctggggagatgctgtctctacaaaaaaaaaaaaaaccaattagctgggcatgttgacatgcacctgtagtcctagcatcttgggaggctgaagaaggagaattgcttgagcccaggaggttgaggctgcagtgagccataatcacaccactgtattccatcctagggtggcctacagagtgagagcctgtctctctgtcttaaaagaaaaagaaaaaagaaaaatgaagcgattactaccaattctaataaaataatgattatgaaagtactataaataattgtatgccaataaattggataacctagatgaaatagacaaactcctagaaacacacaaaaatatgaatataactataatcagtaagaagattgaatcaataaaagcatttgatgaaattcagtattttttcataataaaaacattctaagaatggaaggcaaccacctcaacataaaggcaatatgtgaaaaacccaatgctaacatcttacataacagagaaagactgaaaactttccctgtatgagcaggaaaagacaaggatgcctgctattgacacttttattcaacatagtagtgaaaggtctaatcagaaaaattagggaagaatttttaaaaagacattcaaattggaaggaaggagtaaaattatttctgtttatagataacttgaacttatttgtagaaaatcctaaagatggaacaaacctattagaattaataaattcagtaatgttgcacaatacaaaatcaacattcaaacatcagttgtatttcaatacactaaccatgaacaatctgaagggaaattaagaaaaataatttcaatttatattcacatcaaaaagaataaaatatttaggaataagtttaaccaaagaggtgaaatgattatacctgaaatctacaaagtattgctgaaagaaatgaaagatgacatcaataaattgaaagacattttgtgttcatgaattggaagactcaatattgttaggaggacagtgctgcccaaagtgagctgcagattcaatacaattcctatcagaatctcagtgacatttttgcagaaaaagaaaaatctgtcctaaaatttatattgcatctcatgactctaaatagacacacagctttgaagaggaagaatgaagctggaggactcacacttcctgatttcagcatttactacaaagccccagtaatcaatacagtgtggtactggcataaaggaggacatagaaattaatgaaatatcatagcccagaaagaaatgcttgcatatatggccaaatgattttcatcgagtgtgccaagatcgttcaatggggaagggacagtgttctcaccaaatgatattgggaaaggtggatatccaagggcaagaagagtggaacctttacctaacaccatgtacaaaaattaacccacaatagatcaaagatctaaatgtaagagtaaaaactatacaactcttagaagaaaaacttcatgatagtggatttcacaatgatttcttggttgtaacaacaaaagcataggcaacaaataaaatggataaatcagacttcataaaaatcaaaaccttttatatagcccatgcaaagttcctcagcatcacgaatacttagagatatgcaaatcaaaaccacaatgttacaacacctcacacactttaggatggctttgataaacaacaacaatgacagcaacactaaacaacaggtgtttccaagtagatggaaaaattggagctctagtgcattgctgatgggaatgggaaatgttatagccaatgtaaaaagtagtgtggctgtttttcaaaaaattaaacaataaattaccatttgatccagcaattccccttctggacatactccctatagaattgaaagaaatttgaagaaatatttgtacactgatgtacagagaagcattactcacactagccaaaaatggaaacaactgaaaagtccattgaaagataagtgggtaggcaaatgagatgtatctatacattgaaatgttattcaaccttaacaaggaagaaaattacaatacatcgtgcaaaatggatgaaccttgaagatattatgccaactgaaataagccagacacaaaaggataattattatataattccatttataaaagatagttagaatagccagttacatagagacagaaagtagaatggtgggtgttaagggttagggggagaaggagtgagagttactgtttattgggtacagaggtttaatatggtaagaggaaaaagttctggaaatggatagtgtgatagttacacaacactaaattgcacacttagttaatggtaagtctaatattagatatatataaagtgtctcgtggtcttgccctctctataattacacactttttggcactgcccctttcctgccatgcagagccccaggggtgaatctccctatttctctagctctgcatcagtcactgtcctccgtgctgtgtcccacgtgctgtgcccaaagcctcatacagctggtgacttcagagccaggatgcagctcaggagtcagccctgaagctccctctcttcttatttccctgcagcctggcccgggggaggcttggcttcaactggcagctcgatttagccaacttcaggacaggccaccagggccctttctccacacatgttggttccaccccaggtggagtcaggcagggccaggccagtcaccagaggagcccggagcagagcaggaagcagagtctgagctgctcctccctcacccaaagggcttcctcctctcatttgggggaaaagtgtgagcttgtttcaaagcctcagatgttccttgtagctcatggaataggtacaagaaaacaaagacatggcagaaggggatgtgttcgtgacagcgagaagcaacttgatcttgaggactctccttcttgtccctctgtgaagcctcttctaccacatagggctcagggctgataaagccccctccctacctttctcaggccagacacaaggtcagccatgagaaaacagaaaaacaagcagaagagagtctgtagagataagttgggagggttcaggaggagaatttgggatttgcttgtgcccatgggacacagtctgggaatacaaatgttttcctgactcttctctgaaagccagatagactccacctaaaaccctattgccaaggatgctgggatccacttaccagagactttgactatcatggatttggagatttccttgccagtggctgagttacgaacagagcaagcatagagcccgctatgatttgtagtaatttgggggataaagagcttttgtcctgatagctgaaacttcccattaattgtccaagaatactctgccggtgggttagagtccgcaaagcaggacaagtcgaggttttctcctgaacggtaataggtgaatgaagggtaaattctggggaggtctggaccatctggaggaaagagaataaagccacaggtgatgtcatccaagggaaggggatgctcctggtctcttaaagggacacagtgaccctctgaaccaagacacaacctcaagtgacagccaaatcccatctatgtttactaagcccaagcctgaggtattcccctgtttctctcattacaagctgtgggcccctagtgtcccatgacaagagcgcccctccccttatattcttggttaaggctgtgcctacccaggatttcccagggcagggagtcatggccaggtctgatgtccagaagtaaagttgtctatacttggaccggagagagactgagaggcctggcctctggtcgtttggagttaagctggtgtcctggcccacagaggaacaaaggatactcacagaggacattcagggtgactgggttactgcggatgccaccatatcggtcccgtatttcacattgatagggtcctgtttcatttctcgtgacactgggtagaatgagtatcctgttttcaatgggtcgctttaccctcggactgaccgggaggctctgaccatttagccaccaaatgtaggtgtagttccgactcttaggttcacaggtgaaggctaacacatccttcttctccctggggtttaagttgttgatggtgatgtaaggcatgggcagcttcgctgtgtggataacagaagattgtcctgtgtggcacctttgattcctccacaggcatccttcattcagagttggcatctcccacctgtcaacccacatgagtccttgaaagccagtagctggtgcatgtgtcacaagacagatgtatgatgatctaagggctcaaagactgtgaggcctcctgctctgtcttagggaagcacagactttctcaagtgtcaattgagcagcagtgttgggtcatggacagacacgtcagtgggagtcacagcccctggtacccctcccagtccctccataatcagttgactggctggctcaccctgggttccttacctggaatgtgcaactgctgggccccttccaaattacatcctactttgcccccctagatgtgatttctctgcagcttccatttccaaggacattctagagatgagtaataatgggacttcccattgtcctgaaaccctgcagatactgagcagcctggcctgggactggatgtttcagcagaaataacacagggaagaccagagtcaagcctgtaggtcagttcagtcatcaggcactagaggcaccaggtggggcagtttttttgcaggtgtttcatgatgacttacttgaaccagtgacctctaaagatagagcagagtgcaaggaatgatctagaaagagtgaaggggacaggcaagagctggtggctttggagcagaagcatgttccctgtcctgggttctttaagtttcctctccttctgcagagggcaggtgaggaccatgtggatctttctagaaatacatgtggacatttgcaaatgcagaactgagtggtggaaagggtgggaatgaactgctggaaatctagtcctcatggaccatgtgtgtttgatggatatgagacaaatttggagagaagttttgcaaatattttctttcattggacattctactctctgattccatgggttccactaatctagggacctcatgtaagttgattccagattgaatatgagacgaggctgctggaagccaggagctgggagtggggagaatcagaagttgttcatgggtgtgcagtttcagttatacaagttggagaggttctagagatctgctgtagagcttgatgcctatagttcacacagattatctcttatgcataagttttaggacaaaaagtgttttggatttctgatattttttgattctcaaatatttgtcatatacttactggtttagcatcccaaatctgaaagattcaaaatgtaaaatgcttcagtgagcatttcttttcagcatcagattagtaggcaaaagtgggaggtgataagccagatatattcttgcccttttttttctctcaccatgtttctagcttggtgattagttttcggtgaattccatagtggccatgctgcactcgtatatttttgaaggctttgggatgtgagaaaggctgattgctattttctatgtcatcagaactttccaccttttctggttgcttctttttctcagtgtttgtgttgtggcagtcattaagaagagcctgtcagctcagatttaggacagagttttctaaattctgcaaaaaatgttactgggattctggtaggggttgcattgaatctgcaactcaattgggtagtattgcctttctaacaatattgcttcttccaatccatgaaaatgaaatgtgtttccatatattgatatcgtctttaatttctttcagcaatgttttgtagttttcagggtataatcatttgacctttttggttaaacttattccaaaatattttattccttttgatgttaatgtgaattgaaattctttccttaacttcctttcagattgttcattgttagtgtattgtctaaagaatgatctagaaagagtgaaggggacaggcagaagctggtggttttggagcagaaacatattccctttcctgggttttgattttccctctccctttgcagagagcaggtggctcttccctgacagctagatagactttactggaaaacatggtgccaatgctccagggatccacttaccagggactatgatcctcttgattatgagatttgttccaccagtggctgagttatggatgaaacagacatagacccctctatatgttttagtgatttggggtataaagaacacttgtgctgattgctggaacttcccatcaatcagccaagaatgctctgccagtgggtgagagtctgtgaggcaggagagcttggggacttcccctgtatggtaataggtgtatgaggaagaaacggtgggagcatccaggccatgcggagcaaagagaataatgtcacaggcgatattgtcagagggaagggaaaatcctggtctgtggaagggacacagtcacagtgaccctgtgagccaagttgcaacactgaagtcccagccaaatccccgctgtgttcactgatctggagcctgagacattcacctgtttcttccatcacaagctgtggaacctgagtctcccatgacaggagaagcctcttctctcttattgttgatcaagcctaggcctactctggtttgcctggagcagaaagtcatggccagctttgatgttcagggataaaggtctctgtacttggacctgagagggactgagaggcctggcctctggccacttgtatttgggatggcagcctggctcacagaggaacagaagatactcacggaggagattcagggtgactgggtcactgcggctggcactcactgggttccgtatttcacattcatagggtcctgcaatatactttgtgacaccaaatagatagagggtcctgttggttttggacagctgcaacctgtgagtcatagggaggttctgaccattcagcaaccacaggtagcttgcatccggagtctcaggatcacagattaagcgcacagcctccatgacctccctggggtttaagttgctgctggagatggagggcttgggagtctccgctgtgcagaaaacagagagaagattgccctgtgtggcacctttgattcctccaaaggcatttttcaatcagagttggcatttccaacctctcagcccacccaagtccttaaaagcccatggcaggtgtgtgtgttacaagacagatgcatggcaacctgagggctcagtgattgtgaggctgcctgctttatgtaggagaagcatggactttctcaaatgtgaattgagcagcagcattgggtcatggaaagacacaggaccagcagtcacagcccctggtgcctctctgagtccctccgtctccaactgcctgcctggcccaccttttggtccttacttggggcatgcagtgctggaatcttgttagtttcagtctcactttgccccctgaggtatgttttctcatcagcttcccttgccaaggacatcctagagatggatgatggaacttcccattgtccttaagccctttgggtattagaaagcctggcctggaactgggtacttcagcagaaataacacaggggagaccagagtcaggcctggaggtcagttcagtcatcaggcagtggagccacaaggtggggcagttttccaggtgtctcatagtgactgagttgagccaatgactctaaagatagagcagagtccaaggaatgacctacaaagagtgaaagggacaggcaagagctgataggtttggcccaagaccatgatccctgttctgggtccatgatgctcccttccccctgtagagggcagttgaggaccatatggatctttctagaaatacatgttgatgtttgcaaatgcagaactgactggtggaaagggcaaacatgaacagatgacagaagtctggccctcagggaccttatgtgtttggtggatattagaccaatatttgggaagaagtcttgcagatactttctcttattagacattctactctctgattctgagtttgactactctatgtacctcatatcagtggattccagagggaatcagagattagaatagtagtttgcagcaactgaaatcacgggtatagggcgttgttccgtgggtgtgcggtttctgttatgcaggatgaggaggttctagagatctcctgtgcagcctcgtgcctatacttcatgcagatacagtgctccttatgcagaaagcttaaaacaaagtgttttggatttctaattttttttattttggaatatttgcagtatatgtactggtttagcatcccaaatctgaaaaatttaaaatccacaatgcgcgagtgagcacttctttttagcatcacatcagtggtcagaagtgttgagttttgagcatttcagattgtggatttctggatttccgatgctcaatttgtaatactgtaattttcccataaaaagttgtcaggagtttagacctcatgttatattctgactctagtaacaaaaaaaatttggaggaaaccttaaaatgttttcataagtggaaatttttactgatggtccaaacatctaagatcaattgctggtagtcatatttctcttgagaccaaaataaggtttaggtgtgccatgaattccagcaggatcacattatgctcaaagaaagatgccaaaggtgatttgaaattagcaactccttaagtagagagagtcctgttaaaaggaccgaactggttagtgtgtcaattacataaaaggaggaaggatgccaaattaaaagaagtgatgtgtgttatgttagtaaatatagaaagaacctgcttctaatttctgtgcagagttacaaaacatggggaggaccccaaaacaggtatgtgaaatgtcttcttcattttctcttaaggtcaggaaacaccactaaaatttaagtttgtgtgaattaggaagagtctaagtgagatgccaatggctcttgtgtctccccacacgaagaactccaacttatgaaaacggcatcatcatgaggaaatagttgtatgtggcacaggcagtaaaaccatgagataggacctacctggccacctccatctggtccccaaaccacaagtattcccgttaagtgtatgtgacagcctttgtagttgtcccacaactacaaaatttaaaaattgctattgtcaaaacaaaatattaaatatgaagttgaatatgttgttccgctttttttccccactctttttgagctttcctgtttcagttttggaagtttctattgacacattctcaagctagggattctttcctcagctctgtgcggtctatcagtaagcatcaaaagcattcttcatttctctaacagcatttttttttctgagacagagtctcgctctgtcaccccagctgcagtggcatgatctcagctcactgcaagctccacctcctgggttcatgccattctcctgcctcggcctcccaagtagctgggactacaggtgaccaccaccatgcccagctaattttttgtatttttagtagagacggggtttcaccatgttagccaggatggtctctatctcctgaccttgtgcccgcctcagcctcccaaagtgctgggattataggcgtgagccactgtgcccagccatctctgaaggattttaatgagttgttgacttttgagtttgttcagctttttacttagtgttagaaccgagtgacaaatttcaagcttgttttatgcctgacaggaagccagaagtctctagaaagtgaccggagaatgtgagctccatagcaggttgaggatggagtcactagtgaaatgggtgaaatgagcctatgggcttaattgctcctataattgctcctatagataacatcactattgtagaacgtgagattggtcttttgaaatgtttctcattcttttgccttctgacaaccggctgacctcatccatacctatgcctaatggctcagccagtcatgtggcccctacctagaggcagattcaagcactaacagatcatttccctccgcccgcatgattccatcaccaatcagcagtactcattttttagtcctgtgcccctgaaactatccttgaaaatctctaacacctgatccactggggaggctgatttgagtaataataaacctccaccctcctgtttggcagacttggagttcttaaaatctttctttactgcaaaccaccatttcaataaattttattttattttatatttttttgtgtgcaggaggccagaggaacttgtctggcaattacaagggtggatgggggaactgcctatccctgtcccatggtcttgtccacaggtcagcctcacaaagggaaagagccctggatgggaatacagtggaaggtttctcttagtgacctggggacattggctcgagaggaagcctggcaggagtggcaactccaggtgatttctgcacctttcctatttcctgggaggtgggccaggccacagtgttagcgggaagggaacagaacagccagcctagttagagggagtgtctggggaaggcctagggttggaggaagaagctgtgcaggacagggcttgccagtcagaatgaagtgggaggaagatgagggacacagagaagcagagagaggcagagacaccatggcagtgagcagtgagggagacactgacttcaaaaaccccagggaccaggtgcccccagctccacagtccaggaccaaagagccctgagaaccctccggtggccaaagaacttcagagttgcatgaggtggggtggctttagggtcaagaggtagtggggggatgaaacatgggtgtcagcctctgaaggacaagggacaggtgtggctagaacctcctaggattctgattccaagatccagtctctaaagaggttttggatcatccatttcttcattccattccttcatttgttatgtgagagctcctgagtgtgtctctctcactgggcctgtgctgaggcagggtgtgagtggggaaagaaaacaaggtcctctccttgatcctctcatgacggtgacatggacacttgggaaacacaggatttcacattcagtgatggaggttaagatctgagggggagacctggacattttttttgcactgactctggcggttgaagccagtgatttagttctggagtacagactaatcagctgaccatttgctctcactcctctgaggtttggatgcctaagaagagaggatttgagtcaataaatgactatggggtccttggaacccagtaagccctcacttctggtagaggagaggatgggcctgtggctgcagacagacctcatgtgaccccgatctcccctttgtgtttgtgtgactgtggctcagtgactgtgccttcctgtgcctcagttttctctcaatcaaatgagctaaatggcaaatggactgtggcttttcatgctatctgtgaataaatgttaaagtattcacagtcaactgacttaatgcttggcacagtggaggtgttcacacaaacagcatttattattaatttgcttccatgagaaagcacctttgcgtcagatccctgtggacaaacggctacctggtgcatcttctctcttctgtttctgcttctggggatattagactttctatggagtgtcctaggcctcctaaggcagttggctgatggcctacaaagcttgtctttctgtcctctccactctgagtgtcaggtgaagaaagctctgtccttgcccagatgaggctctgaggactgagccctggctggtgaacagctccaggagacacagtcctcagacagctggtaaatccttggtcccagtaagccctgccaaagaagccacaacccagtcctggcacaggctcctcagctttacctggagcaaggatttagggacaggggtctgggattgaggcttccagagctgaggttctctgagggtatctcagtgggcccctcaggccaagccctactcagttttccagggtctttctcagggtcaaatttatgaagagggcatgaggtgcttggctgagactgatctcctcctgctgagtccccccatcagactgtccttcctctgcagcgagtgtctgcagggtctggatgcgggaaaggaattctgatctgttgaaatgtgtctcctctgtgtgtgtcctgcactaaatgcccaaaccccagcatgggacataatgcagagagtgacacaggcagagtccaggcctgacaattctgtgtgtgtgaagtagaaatgacccctgccccccaacacccagggatcatgcggaatcactcacagtataaggtgacagtgaaatatccagttactcctccagtcccatcgcctcgctttatgatgtgtaaggtgtaggatcctgcatcctcctgtgtgacattctggatcagcagggatgcattggaatatactgtttctcgtccactgtaggcaggcccatatataatttgaccgtgtactacatatgatgtaatgtaatggtagaggtccgtcatttgccctttgtaccagatgtagccagtaagattctggggcaaattgtggacaagtagaagaacatccttcccctcggaaactttgggtggcttggcttcaattattacttgggcagtggtgggcaggttccagaagtttaaaagtgatgctaggaggtagagacagcatcagttaatatttggacctatgtattggggtgaaaagatggggccctgtgtcctgagaaggtctcttcaatcatcagccttgaagatatgcacacacacacatacaaacacacacacacaaaagggcatgtgtgtttgtgtgtgtgtatgtgtgtgtgtcctactgtcctactaggtcaaggtcagcagcatgacccccattccttcaacactcctgaccttggcatttttctgtttgcaatcctcttccccaggggtccgcacggccccctccacactgccctcaggtcctgctcacatcagggcatccttagacttctttcctgatgcctgcttcagagaccctgggtcttccctttctgacctttccctgctctgctccctctagggttcttgtcaacacctgacctcacattctatatctctttgcatgtctgtcttcctccccatgagagtgtgagctctgtgaggacagagacttttgtcatgttggttgcaccccagtgcctggaacaggatgcagactcctgtagatgtgagagttctcagggccctccatgccctgggtgttttttttcccccaattgttgaggttttttgctgaggaaagtgtttcatgccctggttacatttttatttgaggtgtcatctgatatagtcattattatcatttttcaaaatgtggtggcccctgatgattaatcaggaaaacagaacacttaagattttactacctcttaccaattccggttcaatgtgactttcctattttgacccctgtccctctctggtgtattttcccctatccaggctccaacagagccttctttccctttttttctttcttctttttattcttttttttttttttttttgaaatggagtctcgtactgtcacccaggctggcgtgcagtggtgctgtctcggctagctgcaacttctgcctcctgggttcatgtgattatcctgcctcagcctcccgaaagctgggattacaggagcacaccaccatacttggttaattttttgtattttttggtagagacacgtctacactgtgttggccagactgatcttgaactcctgatctcgtgatccacccacctcagcctccctaagtgctggcttcttttattttttagaaccccatcctctccaggataccccatccagtcactctgcttcctcctcctgtcctctcccaggaagtcctctcctcacctgtgagcaggagccccttccaggtgatgtgctgagtgcagggaggggctgagaggggtcccatggtctctgctgtctgtgtgttctcccctgtggagatgagcctaggatccagagacttcctgagcagggctgtcaggtgtgctgtccttcctccttctgtgctgagcctcttcccagggcagaagcacttctcaggctcatgggcggggtcaggcccaggacacctctctgtcccctcctctctcagtcctgcctccttgtccctccttctgtttttccttttgtctgtgtttcaggtccctgggaattgtggaggcctctgcctttttcagcagtgattctttcaccaaacctcaacacacactttgtgcagacacacacacacacacacacacacacacacacagacccacacagtgacacacataccctgcaggttgggcgaggacagtcctgggcctcagcctcctgctgtccccatggctctgggtcggggtgcacattcatgccatttgccctctttcatccccatctggctctccccttcagtgcaggaggctggagctgcaccaggtccctttcacagtgatgtcccattgtgctgtgggtgagctgtgtgttgcctggtgagagggacccttcctttttctaatcgtgtctagcttggctgcagcttccaaggatggtcattcaggacctgggtgtcccagaggaaactgtccttcctggaggtgtgcagggtgaatctctcatgcctcttgggaggagaggcctgtgcctgttgctcagtggtggctgtgagtcccatagtcaaagggaaagttctcggtcactgtatgactccgtggggtccggtggctgagctggagctcatggtttctcatgttcttcctgaccatctttgatgtcctctcttctctgcccagctgattgtcctgtggtcaccacagcttctccgtggtggtgcagaaggaagtgaggagttaaacaggaacccggtgggacatggctcgttgagacgcaggagggggagcctgggtcggagcagagtttcagagctggagagattcatcccgaccaactccgtggcaatgttgggcagagcctttcatgtgttgacatacccaggggtctgtcctgagggtttttgacctggccaagctgctgtgtgtagaggaggaacaggcagtggccagagatcctgtctggagggacgttgctcacacctgagcgggcgggtggggggtgagttgtgttctgggagcaaagagcaataacatcccccttctccccgcaagcacacaggagaggtctgtcttcccaagggacagctggggataggtggccacacctcggatggtgcctgtgtgtgaccatcacacgcgctctgagccccgtggggtgcagcgtgcaggcaggtcacagggtgcctggctgattcccggtgaggctgtgggccctcaggcagccgctattctgtgtcagcgctaagcttggcctgggatgccccagggaacaggacagatggagcaggggcgggcatttagggagcggtgacagaaagagttgatgaggatggagggaggtcacgaggggaaagcgcccagtgtggcatcgcgtgcaccagcgctgccctgggagatgcctttagctgggcccagggaaggagcaggtgtgtggggcaggagctacctgcagagggcgtggtgttaggttggtggcccccaggtcagggaggagctgacagagtccgtgtggggagcatggagggcgctgaggacttaggccgaagtgaccctggtgagggtggacactgctgggctgtgggttccgctgagggaggttggcttcccctgggaaggctccaggctgggagggactcggtcaccctctggtggacagggagggaagtgtgaacggcagcaatcccaggccaggctgcatgttttattccacgtggatctgcacacttcacacgaggtaacacgtatgttatgttacagctccttcaccttccagccccgtgagacccagtctttgtggctgtacgttcactgttctccctctttcacagtcagatgtcccaaaggcagatttttgtcacctttgtgagtttgtgtttgtgtgcagtaggtggcactgtgtataccctgggagcagtgatgtctggggctgagcagtgcacgtgggcttgggagcagaagagggagcagcagcgtgggaagatcaatgtcagaggggcagggacaagtcattttcattttctcactcccagggaccaatcccaggattctgactccagggcacagtaccacaccctgcttgtgtccctggatgtcatgatgctcatagtgtcatgttgccttggcattcattttttaaggtgtaagtttatttgcctcaaatcagaggcagggcttggtcaccatggcagttttcaatactgtatctggttcaagtggctccagttggtggccagagataaaatcttagaggtatctctcctgcttggtgtgctgggctcacctctctccagctgctttctttaaactgataattctgacatttgccctcacatttaaagtgaccacctctcagtcacagcttgagctcctggtcccagtgtttgctgcttgctttgaacacatccattaaagctccctgctggaaacctgtcagataacaccctggacttaataaaggcattggcttaccggtctcttctctcctccctgcctgggctcactgacctctgtgtctgtggcctccaggtgtgctgagtgctccctagtgtctgtaagtagtaaaaatacttatattttcacgttcttgttatatcattatagcctcacatgccatccagggcctgacattgaggctgccctatgggacttgtgctggttgagcttctgctggagctcttgttttggggcctctggttctcctggggacaggagcttccagctaacttgattgaaaacctgatgcctttcattggaacactgggtcaggtgatgtattcatgggcttcacctgccataacataaccttagcctgggtgaattaaataatagaaatctatttttcacagttctgtgaataatgtgctattttaaccactttaaaatgcacaatcaagtgaaattaaccacatacaccatgttaaattaccatcaccactatttttcctagaaaatttttatcattttaaactgaaactttgtcacttttaaacaatacctccctgtatgttccaccctagaccttgatcatctccactctctctctatgaatttgcctattcttgatgtttcatataaatggaattatacaattatgttattttgtttctgacatatttcacttagcataatgtttcccaagtccatgcatgttccagtgggtgtcagagcttcattcctctttatggcaggttaacaatctgttgtatgtgtcaccatatttgtttattcatgtgttgatgaacacttggattattttcatattttatcttttgtgaataatgctgcaatgaacattcccatgcaagtacctgtttgaggccctggatttaattctttgggtatgtacctaggaatgcctgttgtttcaaatgagaattctatgattagctttttgaggaacagcaaaactctttctccaagtggctgtaccttttcatattctcaccagccatgtatgaggattccaaattctacataatgctgctacttgttgtttaacattttaaaagaatggtagccagttttgtaggtgtgatgtggtgtctcattgcagctttgactttgtattttcctaatgactatagatgttgagtatcttttcatgtccttcttgactatttgtatatcttctttgaagaaatgtctatatgagtcttttgcccatttataaattggatggtttgtccttttgttattgagttttagctagttctttatattaactggatatgaaaactgcctatatgtggtttgcaaatattttctttcattcttttctattaattattttcttgataatttcctttgatgtacaaaaggctcacatcttgataaagcccaacatatcttgtttttcttgtttctcatgcttttgtatcatatctaagaatccattacacatttgagttcatcaatatttacctctatgtctagtttaagatgtttttatggttataggtcttatattttactcactcatcaattttttagagaattgtttgatatggtgggaggcagagttatctaaattcactgttttgcatgtggttatctagttgtttctgtactatgatttgaaaggagaattgttcatccattaaattgtcttgacaccctcttcaaggagtaattgaccataagtttgagggtttatttctagattcttaattctatcccatttgtctttatgtctattcttttgccagcagcttatgtctattctttggcagcagcttccattttaataattgtactcttttgtgagatttcaaataagaaagttcaagtcctacaatttattttggcaagattgttttagctactcaggggtacttttttgaaaggtggggaggccaatgtttcacaattgggaaagccttttctctcttcttcagggggaaatttgggagaagcttttaagaaactttatctaagtaggtaaactgtcaccactttatttgctgaagtgctatgttaaagtgtgcattgcctcttgtggaagaattatgagaccctggaagcacttgcccatgtggtgagagacagtgaattccacgatgaggggcagagaggacattgttttgggatacagtgttgttgggggagttgtatacatctcaacttctttatgtctctgtacagtgggtgtagggagcagccccacagggtcgttgggtttttctccctgtgtgtggagatgagagattgtggaaataaagacacaagactaagagataaaagaaaagacaactgggcctgggggaccactaccaccaagatgcggagaccggtagtggccctgaatgccaggctgcactgatatttattggatagaagacaaaggggcaggataaggaatgtgtgccatcttcaatgataggaaatgccacctgtgtcacatgtccactggacagggggcccttccctgcctggcaggtgaggcagagagagggaggagaatgagagagagagcttacagcattatttctgcttattagagacttttagtactttcactaatttgctactgctaactaaatggcagaaccacgtgtacagtatggaacatgagggcggactaagagtgtgaccactgaagcacagcatcacagggagacggttaggcctctggataactgtgggtggacctgactaatgtcaggccctccacaagaggtggaggagtagagtcttctctaaactccgccggggaaagggagactccctttccggtcggctaagtagtgggtgtttttccttgacactgaggctaccactagaccacggtccacttggcaaagggtgtcttcccagacgctggtgttaccgctaggccgaggagccctctagtggccctgtctgggcataacagaagccttgcactcttgtcttctggtcacttctcactatgtctcctcagctcctatctctgtatggcctggcctttcctaggttatgattataaagcgaggattattataatattggaataaagagtaattgctaccaactaacaattaatgatattcatatataatcatatctaagatctgtacctggtataactattcttcttttatattttatgatactggaacagctcatgccctgagtctcttgcctcagcacctgggtggcttgccgcccacaagtgggcatctccattggacacagtaggttttgaaatccttgtttatcctctggggtctgggtcttggcttacctattagctgcaactgaaagaggagtctgttaagtcaatgactcctgtacggagtagaaggtttcagcagagtgaaagtagctggggttcatagaagccaggaatgtctgactcttagaaactgtgtgtcagcagatgggtgtcctcaggggtacatgggccatgccagtagccactgcagtggactggaagaaggtaagggatgctgggtatcccatgttctctctcagctctgcagctgaagatttgggccctgggcttgtacgaccctgaagcaggggaagggtatacaggaatggctgcatatcaggaccaagtccatgtcatcttctgaggcattgttactgcagatggaggattctgttcagagaccaggcctggacacatgggagggcccaccccattcttttaaaattgttttaagagaacagtattagcaaatgtagtacatgttttattctgctagaatcagtcttactgtcacgttttacaatgtatctcttaggaaatggtgagagccatccacacaatgtgcatttaaaggggagtctactataatttcagctttcctactctttatagaaaccatcttctctgcaaacacacaggcaatatctctgtgttcatttctattgggagccctgtatgcaagatggagagagccacatttcctcctgagatgttatgtaaaagtctgaggttgagatgacatatctgacactctgttgttaccctcagaagctcctatactacatgtgaaattctaatgactgcattatcctgccaagtgaaagaggcaggcacaagcaaggacagctaagaggggtgagagcctcatcatgatggggagtcttattctgacatcttgggaaaagctgtccacagtgtgaagtcatcaacttgttttccttgtttacagtttgagcagctgttgttatggtgttgaacattttggtgagttctgagtggctcagacatcaggtacaaggattttcccatgaaatttacattgagttgtccaactctgacttatagggcttctggaacagagtgggtcttgctctttgaggttccatgggagaagatggaattggaggaactagtagaattcagggtaatgtccagtctacagtggataataaaaacacagaaacaatgaacagagctgcaatctcataacaggtgtactacggttttattttccacataatttttctctctatgggcatctctagttttaccaatgataatttcagtagaataagtttgtttgcaaaataggttgagtttcttcaaacttggtctgattgtttacataagtgcagcaagagtagcaatggactatgtaggctctcttttaaaattttctttgctgtaagtttttataaggaatctcagattaaacctttacaaaactcttgagaataggaagccaaaccaaggctgacttcagagtttgcctgcagttcatactggttcattctagctatattcttaaatataacatcccagtcaaagccttggtaatataaccaatgatttgaaatgtgtcctgttacaaagagagcaggttgttactctgtttgtgcaaatatctgtattaccataaacatatcaatactcatgaatagttgcccaattctggggcattcaggtagagagcaaaagtaaatatttcaattatcattcccagaagtatagtttattgaaccactataagctagagatagattaaaagacaaatttccataaatctagaaaactatccacataaagaatcagcatattttcaaataaaaatcataaaaacattatcctcattattatcaattatttcaatgaaatcaatgtttttcctgcttggtctaggctgggaatgttatgaagatatcagcctgtttgttaaagttttcgaagttcttagacaaatttggagggttcaggaggaaaatttgggatttgcttgtgcccatgggacacaggctgggaatacaaatgttttcctgacttttctctgaaagtcagatagactgcacctaaaaccctattgccaaggatgctgggatccacttaccagagactctgactgtcacggatttggagctttccttgccagtggctgagttacgaacagagcaagcatagagcccgctatgctttgtagtaatctgggggatagaaagcttttgtcctgatagctgaaacttcccattaattgtccaagaatactgtgccggtgggttagagtccgcaaagcaggacaagtagaggttttgtcctgaatggtaataggtgaatgaagggtaaattctggggaggtctggaccatctggaggaaagagaataaagccacaggtgatgttatccgagggaaggggatgctcctggtctcttaaagggacagagtgaccctctgagccgagacacaccctcaagtgacagccaaatcccctctatgttcactgagccgaagcctgaggtattcacctgtttctcccatcacaagctgtgggccccaagtctcccatgacaagagcgtccactccccttatattcttggttaaggctgtgcctacccaggttttcccagggcagggagtcatggccagctcggatgtccagaagtaaatatgtctatacttggaccggagagagactgagaggactggcctctggtcgtttggagttaagctggtgtcctggcccacagaggaagaaaggatactcaaggatactcacagaggacattcagggtgactgggtcactgcggatgccaccatatcggtcccgtatttcacattgatagggtcctgtttcatttctcgtgacactgggtagaatgaggatcctgttttcaatgcgtcgctttaccctgggactgaccgggaggctctgaccatttagccaccaaatgtaggtgtagttctcactcttaggttcacaggtgaaggttgagacatccttattctccctggggtttaagttattgatggtgatgtagggcttgggcagcttcgctgtgtgaataacagagagaagattgtcctgtgtggcacctttgattcctccacaggcatccttcaattagagttggcatctcccacctgtcaacacgtgtgagtccttgaaagccaatagctggtgtgtgtgtcacaaggtagatgcatgatgatctaagggctcaaagactgtgaggccacctgctcagtcttagggaagcatagactttctcaagtgtcaattgagcagcagtgctgggtcatggacagacatgtcagtgggagtcacagcgcctggtacccctcccagtccctcactaatgagttgactggctggctcaccctgggttcattacctggaatgtgcaactgctgggccctttccaaattgcatcctactttgcccccctagatgtgatttctctgcaacttccatttccaaggacattctagagatgagtaataatgggacttcccattgtcctgaaaccctgcagatactgagcagcctggcctgggactggatgtttcagcagaaataacacaggggagaccatagtcaagcctggaggtcagttcagtcatcaggcagtggaggctcaaggtggggcagttttttgcaggtgtttcatgatgacttacttgaaccagtgacctctaaagatagagcagagtgcaaggaatgatctagaaagagtgaaggggacaagcaagagctggtggttttggagcagaagcatgttccctgtcctgggttctttaagtttcctctccttctgcagagggcaggtgaggaccatgtggatctttccagaaatacatgtggacatttgcaaatgcagaactgactggtggaaagtgtgggaatgaactgctggaaatctggtcctcatggaccatgtgtgtttgatggatataagacaaatttggagagaagttttgcaaatattttctttcactggacattctactctctgattccttggggttgactactctagggacctcatgtaagtggattccagagtgaatatgagaagagactgctggttgccaggagctgggagtggggagaatcagaagttgttcatgggtgggcagtttcttttatgcaagatggggagtttctagagatctgctgtagagcttgatgcctatagttcacaaagatggagtatttcttatgcctacaacttaggacaaaaagtgttttgcatttctttcattttttgattctgaaatatttgtcatatacttactggttaagcatcccaaatctgatagattcaaagtctaagatgcttcagtgagcatttcttttcagcatcagattagtaggcataagtgggaggtgataagccaaagatattcttgcccttttttttctctcaccacgtttctagcttggtgattagttttcggtgaattccatactggccatgctgcacttgtatatttttgaatgccttggcatgtgagaaaggctgattgctattttctatgtcatgagaactttccaccttttcatggttgcatctttttctcagtgtttttgttgtggcagtcattaagaagagcctgtcagctcagatttaggacagagttttctaattctgcaaaaaatgttactgggatgctggtaggggttgcattgaatctgcaactcactttgcgtagtattttctttctaacaatattgattcttccaatccatgaaaatgaaatgtgtttccatatattgatatcatctttaatttgtttcaggaaggtttgtagttttcagggtataatcatttgacctttttggttaaacttattccaaaatattttattccttttgatgttaatgtgaattgaaattattttcttaatttcttttcagattgttcattgttagtgtatagtctgaagaatgatctagaaagagtgaagggtacaggcaaaacctggtggttttggagcagaaatatattccctttcctgagttttgattttccctctccctctgcagagggcaggtggctcttccctgatagccagatagacttccctggaaaacatattgccaatgctccagggatccacttaccagggactatgatcctcttgattatgagatttgttccaccagtggctgagttatggatgaaagagacatagacccctctatatgttttagtgaattggggtataaagaacacttgtactgattgctggaacttcccatcaatcagccaagaatgctcggccagtggatgagaatctgtgaggcaggggagcttggggacttctcttgtatggtaataggtgtatgaggaaaaaatggtgggggcatccaggccatgtggagcaaagagaataatgtcacaggtgatattgtcagagggaaggtaaaatcctggtctgtggaagggccacagtgaccctgtgagtcaagtcgcaacactgaagtcccagccaaatccccgctgtgttcatgatctggagcctgagacattcacctgtttcttccatcacaagctgtggaccctgagtctcccatgacaggagcagcctcttttctcttattgtggatcaagcctaggcctactctggtttgcctggggcaggaagtcaccaccagctttgatgtccaggggtaaaggtctacatacttggacctgagagggactgagaagcccggcctctggccatgtgtatttgggatggcagcctggctaacagaggaacagaagatactcacggaggagattcagggtgactgggtcactgcggctggcactcactgggttccgtatttcacattcatagggtcctgcagtatagtttgtgacaccaaataggtagagggtcctgttggtttcagacagctgcaagctgtgagtcatagggaggctctgaccattcatccaccacaggtagcttgcatctggagtctcaggatcacaggttaaaatcacagcctccgtggcctccctggggttgaaattgctgctggagatggagggtttgggagtctccactgtgcggaaaacagagagaagattgccctgtgtggcacctttgactcctccaaaggcatttttcaatcagagttggcatttccaacctctcagcccacccaagtccttaaaagcccatggcaggtgtgtgtgttacaagacagatgcatggcaatctgagggctcagagattgtgaggctgcctgctttatgtgggagaagcatggactttctcaagtgtgaattgagcagcagcattgggtcatggaaagacacaggaccagcagtcacagcttctggtgcctctctgagtccctccatctccaactgcctgcctggcccaccttgtggtcctcacttggagcattcagtgctggaatcttcttagtttcaatcttactttgccccctgtggtatgttttctcttcagcttccctttccaaggacatcctagagatggatgatggaacttcccattgtccttaaaccctttgggtactggaaagcctggcctgggactgggtacttcagcagaaataacacaggggagaccagagtcaagcctggaggtcagttcagtcatcaggcagtgcagccacaaggtggcgcagttttcccaggtgtctcatagtgactgacttgagccagtgacctctaaagatagagcagagtccaaggaatgacctacaaagagtgaaggggacaggcaagagctgataggtttggcccaagaccatgttccctgttctgggtccatgatgctccctttcccctgtagagggcaggtgaggaccatgtggatctttctagaaatacatgttgatgtttgcaaatacagaactgactggtggaaagggtgaacatgaactgatgatggaagtctggtcctcatggaccatatgtgtttggtggatattagaccaatatttgggaagaagtcttgcagatactttctctcattagacattctaccctctgattctgagtttgactactctatgtacctcatatcagtggattccagagtgaatcagagagtagaatagtagtttccaggagctgggattaggggaatagggcactgttccgtgggtgtgtggtttcagttatgcaggatgagggggttctagagatctcctgtacagcctcatgcctatagttcatacagataaagtgctccttatgcagaaaggttaaaacaaagtgttttcaatttctaatttttttattttggaatatttgcagtacatgtactggtttagcatcccaaatctgaaaaatttaaaatccacaatgcgccagtgagcacttctttttagcatcacatcagtggtcagaagggttgagttttgagcatttcagattgtggatttctggatttgggatgctcaattcgtaatactgtaattttcccataaaatgttgtcaggagtttagacctcaggttatgttctgactctaataacaaaagaaaaatttggaggaaacattaaaatgttttcattagtggaaatttttactgatggtccaaacatctaagatcaattgctggtagtagtatttctcttgagacgaaaatgaggtttaggtgtgccgtgaattccagcaggatcacattatgctcaaagaaagatgccaaaggtgatttgaattagcagctccttaagtagagagagtcccgttaaaaggacagaactggtcagtgcatcaattacataaagagaggaaggatgccaaattaaaagaagtgatgagtgttatgttagtaaatatagaaagaactgcctgcttataatttctgggcagagttaggaaaaatgcggaggaccccaaaacaggtatgtgaaatgctttcttcattttctcttaagctcaggaaacaccactagagtttaagtttgtgtgaattagtaagaggctaagtgagatggcaatggctcgtgtgtctccccacacgaagaactccaacttatgaaaacggcatcatcatgaggaaacagttgtatgtggcacaggcagtaaaaccatgagatagcacctacctggccacctcgatctggtccccaaaccacctgtattcccattaagggtatgttacagcctttgtagttgtcccacaactacaaaatttaaaaattgctattgtcaaaacaaaatactaaatatgaagttgaaatgttgttccactttttttcccccactctttttgaactttcctgtttcagttttggaagtttctattgacacattctcaagctaggtattctttccacagctgtgtgcagtctaccagtaagcatcaaaagcattcttcatttctcaaacagcattttttttttctgagacagagtctctctttgtcacccaggctggagtgcagtggcatgatctcagctcactgcaagctccgcctcccggtttcactccattctcctgcctcagcctcccgagtagctgggactacaggtgcccaccaccacgtcccactaattttttgtatttttagtagagacggggtttcaccatgttagccaggatggtctgtatctcctgaccttgtgcctgcctcggcctcccaaagtcctgggagtataggtgtgagccactgtgcccagccatctctgagggattttaacgagttgttgacttttgagtttgttcagcgttttacttagtgttagaaccgagtgacaaattccaagcttgttatatgcctgacagaaagccagaagtctctaggaagtgacaaaagaatgtgagctccatagcaggttgagaatggagtcacgagtgaaatgggtgaaatgagcccatgggctttgggaactgcaggcccttccagcctctgacaccctgatgagtccgtgcaaagattacaacagtgacagcaaactagcgtggctgactccatctggcatctagtctcaggctggctgtcctcactcattcctggacataggccaggctatccttgggaagaatttggtttatggtttaactttgaagcaagaatgatgatagttcctccataaaactaacacccttactttgcccagggactgccttggtaaaactagtgaaagaccatgagatttagattataagagggaactgaattctgctaaaatgttggcacagtttctataatccctgactgctccagtgtcatttggcaagagtttacaaaatttgtaactaattgctcctatagataacatcactattgtagaacgtgagattggtcttttgagatgtttctcattcttttgcattctggcaaccggctgacctcatctatacctatgactaatggctcagccagtcatgtggtccctacctagaggcagattcaagcactaacagatcatttccctctgcccacatgattccatcaccaaacaatcagcagtactcattttttagtcctgtgcccctgaaactatccttgaaaatctctaacccctgatccactggggaggctgatttgagtaataataaacctctgtcctcctgtttggcagacttggagtcattaaaatcattctttactacaaatcaccatttcaatatatatatatatatatatatatatatatatatatatatatttttttttttttttggtgtatgtatgtgtgcaggaggccagaagaacttgtctggcaattataagagtggatggaggaactgcctatccctgtcccatggtcttgtccacaggtcagcctcacaaagtgaaagagccctggatggaaatacagtggaagctcattctcttagtgacctggggtcattggctcgagatgaagcctggcaggagtggcaactccaggtgatttctgcacctttcctatttcctgggaggtgggccaggccacagtgttagcgggaagggaacagaacagtcagcctagttagagggagtgtctgcggaaggcctagcagtggaggaagaagctgtgcaggacagggcttgccagtcagaatgaagtgggaggaagatgagggacacagagaagcagagagaggcagagacaccatggcagtgagcagtgagggctacactgacttcagtgaccccagggacaaggtgcccccatttccacagtccaggaccaaggagccctgagaaccctccgtggccaaagagcttcagagttacatgaggtggggtggctttaggggcaagaggtagtggggtgatgaaacatgggtgtcagcctccgaaggacaagggacaggtgtggctagaaactcctgggattctgcatccaagatccagtctctaaagaggttttggatcagtcatttctgcattcaattcctttatttgttatgtgagagctcctgagtatgtgtctctggctgggcctgtgctggtgcagggtgtgagtggggaaagaaaacaaggtcctctccttgatcctctcatgacagtgacatgggaactttgggaaacacaggatttcaggttcaatgatgggtgttaagatctgagggggagacctggacattttttttgcactgactctgatggttgaggcagctgatttagttctggagtgcagactaatcaggtgaccacttgctctcactcctctgaggtttggatgcctaagaagagaggatttgagccaataaatgagtatggggtgcttggaacccagtaagccctcacttctggtggaggagaggatgggcctgtggctgcagacagacctcatgtgaccctgatctcccctttgtgtttgtgtgactctggctcagtgactgtgctttcctgtgactcagttttctctcaatcaaataagctaaatggcaaatggactgtggcttttcatgctatctgtgaataaatgttaaattattcacagtcacctgacctaatgcgtagcactgtggaaatgttcaccaaacagcatttattattaatttgcttccatgagaaagcacctttacgtcagatccctgtggacaagctgctacctggtacatcttctctcttctgtttctgcttctggggatattagactttctatggagtgtcctaggcctcctaaggcagttggctgatggcctacaaagcttgtctttctgtcctctccactctgagtgtcaggtgaagaaagctctgtccttgcccagatgaggctctgagggctgagccctggctggtgaacagctgcaggagacacagtcctcagacagctggaaaattcttagtcccagtaagccctgcccaagaaaccataacccagtcctggcacaggctcctcagctttatctggagcaaggatttagggacaggggtctggggttgaggcttctagggctgagcttctctgagggtctcagggggcccctcaggccaagccctactcagttttccagggtctttctcagggtcaaatttatgaagagggcatgaggtgcttggctgagactgatctcctcctgctgagtccccccatcagactgtccttcctctgcagcaagtttctgcagggtctggatgtgagaaaggaattctgatctgttgaaatttgtctcctctgtgtgtttcctgcaataaatgcccaaaccccagcatgggacataatgcagagagggacacaggcacagtccaggcctgacaattctgtgtgtgtgaagtagaaatgacccctgccccccaacacccagggaccatgtggaatcactcacggtataaggtgaaggtgaaacgtccagttactcctccagtcccatcacctcgctttatgatgtgtaaagtgtaggatcctgtgtcttcctgggtgacattctggatcagcagggatgcattggaatatactgtttctcgtccactgtatgcaggcccatatttaattatttgaccgtctactatatatgatgtaacataatggtagaggtccctgatttgtcctttgtaccagatgtagccagtaagattctggggcaaattgtggacaagtagaagaacatccttcccctcggaaacttttggtggctgggcttcaatcgtgacttgggctgtggtgggcgggttccagaagtttaaaagtgatgctaggaggtggagagagcatcagtcaatattgagacctatgtgttgggttgaaaagatgggcccctgggtcctgagaaggtctcttcaatcctcagccttgaagacacacacacacacacacacacacacacacacacacacacaaacacacacacacacatataaaaggggcatgtgtgtttctgtgtgtgtcctactgtcctactaggtcaaggtcagcagcatgacccccattccttcaacactcctgactttggcatttttctgtttggaatcctcttccccaggggtccgcacggccccctccacactgccctcaggttctgctcacatcagggcatccttagacttctttcctgacacctccttcagagaacctgggtctttcctttttgacctttccctgctctgctccctccagggttcttgtcaacacctgatctcacattctagatctctttgcatgtctgtcttcctccccatgacagcatgagctccgtgaggacagggacttttgtgatcttggtcgcaccccagtgcctggaacaggctgcagactcctgtagatgtgagagttctcaggggcctccatgccctgggtgttttttttcctcccaattgttgaggttttttgctgaggacagtgtttcatgccctgcttatatttttatttcaagtgtcatctgatatagttattattttcatttttcaaaatgtggtgacccctgaggattaatcagaaaaacagaacacttaagattttcctacctcttaccaattccggttcaatgtgactttcctattttgacccctgtccctctctggtgtattttcccctatccaggctccaacagagccttctttccttttttttcttttttcctttttttcttttgggacggagtctcatactgtcacccaggctggcatgcagtggtgctatctcggctagctgcaacttctgcctcccgggttcatgtgattctcctgcctcagcctcctgagtagctaggattacaggagcacaccaccatacctggttaattttttgtatttttagtacagacagggctacattgtgttggccagactgatcttgaactcctgatctcttgatccacccacctcagcctcccaaagtgctggcttcttttattttttagaaccccatcctctctaggagaccccatccagtcactctgcttccttttcctgtcctctcccaggaagttctctcctcacctgtgagcaggagccctttccaggttatatgctgtgtgcagggaggggctgagaggggccccatggtctctgctccctgcgtgttctcctctgtggagatgagcctaggatccagaatcttcctgagcacggctgtcagctgtgctgtccttcctccttctgcactgagcctcttcccggggcaggagcacttctcaagctcatgggtggggtcaggcccaggacacctctctgtcccctcctctctcagttctgcctccttgtccctccttctgtttttccttttgtctgtgtttcaggtccctgggaattgtggagccctctgcctttttcagcagtgattctttcaccaaacctcaacacacactttgtgcagacacacacacacacacacacacatacacacacacacacacacacagaagagacacacacagacccacagagtcacacacataccctgcaggttgggcaagcgcagtcctgggcctcagcctcctgctctccgcatggctctggttaggggtgcacattcacgccctttggcctctttcatccccatctggctctcccctgcagtgcaggaggctgaagctgcaccaggtccctgtcacagtgatgccccattgtgctgtgtgtgaactgtgtgtttcctggtgagagggacccttcctttctctaatcgtatctagcttggctgcagcttccaaggatggacgttcaggacctgggtgtcccagaggaaactgtccttcctagaggtgtgcagggtgaatctctcatgcctcttgggaggagaggcctgtgctgattgctcagtgggggctgtaagtcccatagtcaaagagagagttctcggtcactctttggctccctggggtctggcggctgagctggagctcaggatttctcgtgttcttcctgaccatctttgatgtcctctcttatgtgcccagctgattgtcctgtggtcaccacaccttccctgtggtggtgcaggtggcagtgaagagttacccaggaaacccgcgggacatggctcgttgagacacaggagggggagcctgggacagagcaggggttcagagctggagagattcatcctgacttactccgtggccatgatgggctcagccctccatgtgccgacatacccaggggtctgtcctgagggttttgacctggccaagctgctgtgtgtagaggaggaacaggcagtggccagagatcctgtctgcagggacgttgctcacgcctgagatggtgggtgggggtgggttgtgttctgtgtgcaaagagcaataacacccccctttccccgcaagcacacaggagaggactgtcttcccaagggacagctgggggtaggtggccacatcccagatggtgcctgtgtgtgaccatcacacacgatctaagccaccaggggttcagcgggcaggcaggtcacagggtgcctggctgattcccggggaggctgtgggcccttaggcagccgctgatctgtgtcagctctaggcttcacctgcgaagccccagagaacaggacagatggagcaggggtgggcatttagggagcagtgacagaaagagttgatgaggatggagggagttcacgaggggaaagcgcccagtgtggcgttgcgtgcaccagagctgccctgggagatgcctttagctgggcccagggaaggagcaggtgtgcggggaggagctacctgcagggggagtggtgttaggttggtggctgccaggtcagggaggagctgacagagtccatgtggggaacatggagggcgcgctgaggacttgagccgaagtgaccccggtgagggtggaccctgctgggctgtgggttccgctgagggaggttggcatcccctgggaaggctccaggctgggagggactctgtcaccctctgttggacagggagggaagtgtgaacggcagcaatcccaggccaggctgcatgttttattccatgtggatctgcacacttcacacgagatcacacatatgttatgttacagctccttcaccttccagccccgtgagtcccagtctctgtggctctacgttcactgttctccctctttcacaatcagatgtcccaaacgcagatttttgtcaccttctgtgagtttgtgtttgtgtgcagtaggcggcactgtgtataccctgggggcagtgatgtctggggctgagcagtgcacgtgggcttgggagcagaagagggagcagcagggtgggaagatcaacgtcaggggggcagggacaagtcattttcattttctcactcccagggaccagaacccaggattctgactccagggcagagtaccacaccctgcttgtgtccctggatatcatgatgctcatagtgtcatgttgccttggcattcactttttaaggtgtaagtttattggcctcaaatcagaggcagggcttgtacaccatggccgttttcaatactgtgtctggttcaagtggctccagttggtgtccagagataaaatcttagaggcatctctcctgcttggtgtgctgggttcccctctctccagctgctttctttaaactgataattctgacatttgccctcacatttaaagtgaccatctctcagtcacagcttgagctcttggtcccagtgtttgctgcttgctttgaacacatccattaaagctccctgcctgaaacctgtcagataacaccctggacctaataaagccattggcttaccggtctcttctctcctccctgcctgggctcactgaacactgtgtctgtggcctccaggtgcgccgagtgctccctagtgtctgtaagtagtaaaaatacttatattttcacgttctggttgtatcattgtagcctcacatgccatccagggcctgatattgaggctgccctatgggacctgtgctggttgagcccctgctggagctcttgttttgggacctctggttctcttggggacaggagcttccagctaacttgattgaaaacctgatgtctttcattgaaacactgggtcagatgatgtattcatgggcttcagctgccataacaaacaccttagcctgggtgaattaaataatagaaatctgtttttcacagttctgtgaataatgtgctattctaaccactttaaaatgcacaatcaggtgaaattaaccacatacacagtgttaaattaccctcaccactatttttcctagaaaattgttatcattttaaactgaaactttgtatcttttaaacaataactccctgtatgttccaccctaggccttgatcacctctactctgtctctatgaatttgcctattcttgatgtttcatataaatggaattatacaattatgttattttgtttctgacatatttcacttagcataatgtttcccaagtctatgcatgttccagtgggtgtcagagcttccttcctctttatggcagattatcattctgttgtatgtgtcaccatatttgtttattcatgtgttgatgaacacttggattgttttcatattttatcttttgtgaataatgctgcaatgaacattcccatgcaagtacctgtttgagtccctggatttaattctttgggtacatacttaggaatggatgttgtttcaaatgagaattctatgattagctttttgaggaacagcaaagctttttctcttagcggctgtaccttttcatattctcaccagcaacgtatgaggattccaaattctacataatgctgctacttgttatttaacattttaaaagaatggtagccagttttgtaggtgtgatgtggtgtctcattgcagctttgactttgtattttcctaatgactaatgatgttgagtatcttttcatgtccttcttgactcttggtatatcttctttgaagaaatgtctatatgagtcttttgcccatttataaattggatgctttctccttttgttattgagttgtagctagttttttatattatctggacatgaaacctgtctatatgtggtttgcaaatattttctctcatctgtgtatattaattattttcttgataatttcctttgatgcacaaaaagctcacatcttgataaagcccaatttatcttgtttttcttgtttctcatgctttcgtatcatatctaggaatccactggatacttgaggtcatcaatatttacctctatgtctattttaagatgtttttatggttatatatctgatatttaactcactgatcaattttttacggaattgtttgataaggtgagaggtagggttatctaaattcactgttttgcatgtggttatctagtggtttctgcactatgatttgaaaggagaattgttcctccattaaactgtcttgacaccctcttcaaagtgtaattggccataagtgtgagggtttatttctagactctcaattctatcccatttgtctttatgtctattcttttgccagcaacttgtgttttaataattgtactcctttgtgagatttcaaataagaaagttcaagtcctacaatttattttggcaagattcttttggctattcaggggtacttttttgagaggtgggtaggccaatgtttcacaattgggaaagccttttctgtcttcttcagggggaaatttgggagaacctttaagaaactttacctaagcaggtaaactgtcaccactttatttgctgaagtgctatgttaaagtgtgcattgcctcttgtggaagaattatgagaccctggaagcacctgcccaggtggtgagagacagtgaattccatgatgaggggcagagaggacattgttttgggatacagtgttgttgggggagttgtacacatctcaacttctttatgtctctgtacagtgggtgtagggagcagctccatagggtcagtgggtttttctccctgtgtgcagagacgtgagattgtagaaataaagacgcaagacaaaaagataaaagacagctgagcctgggggaccactaccaccaagatgcagagataggtagtggccccgaatgccaggctgtgctgatatttattggaaagaagacaaaggggcaggataagcagtgtgagccatctccaatgataggtaaggtcacatgggtcatgtgtccactggacagggggcccttccctgcctggcagctgaagcagagaaagagagaagaaagagagagagagcttacaccattatttctgcttattagagacttttagtactttcactaatttgctactgctaactaaacagcagagccagttgtacaggatggactatgaaggcggactaggagtgtgaccacttaagcacagcaccatagggagacggttaggcctcttgataactgcgggtcgacctgactaatgtcaagctctccacaagaggtgaaggagtagagtcttctctcaactccctcggggaaagggagactcccattcctggtcggttaagtagcaggtgtttttccttgacactgagacaatcactacttcatggttcgcctggcaacctgcatcttcccagacgctggtgttaccgctacacgaaagatccctctagtggccctgtctgggcataacagaaggctcgcactcttgtcttctggtcacttctcactatgtctccccagctcctatctctgtatagcctggcttttcctaggttatgattatagagcgaggattattataaattggaacaaagagaaattgctgccaactaatgattaatgatattcgtatataatcatatctaagatctatatctggtataactattcttcttttatattctatgataatggagcagctcgtgccctcagtctcttgcctcagcaccttggtggcttggtgcccagaagtgggcatctccgttggacacagtaggttttaaaatccttgtttatcctctggtgtctgggtcttggcttagctgttcgctgcagctgaaagaggtgtctgctaaggcaatgacacctgtggggaggagaagggttcagcagagtgaaagtagctggggctcagagaagacaggaaagtctgactctttgaaactgtgggtcagctgatgggtgtcctcaggggtacatgggccatgccagtagccactgcagtggactggaagaaggtaagggatgccgggtatcccatgttctctctcagctctgcagctgaagatttcggccctgggctggtacggccctgcagcaggggaagggtacacaggaatggctgcatatcaggaccaagtccatgtcatcttctcaggcattgttactgcagatggaggattgtgttcagagacctggcctggacacatgggagggcccaccccattctattaaaattattttaagagaacagtattagcaaatgtggtacatgttttattctgctagaatcagtcttgctgtcatattttacaatgtatctcttaggaaatggtgagagtcatccacacaatgtggatttaaaggggactctactataatttcagctttcctactctttatagaaaccatcttctctgcaaacacacaggaaatatctctgttcatttctattgggagccctgtatgtgaggtgaggtggagagtgccacatttcccttgagatgttatgtaaaagtttgaggttgagatgacatatctgacactctgttgttaccctcagaagctactacatgtgaaattctaatgactgcattatcctgccaagtgaaagaggcaggcacaagcaaggacagctaagaggggtgagagcctcatcatgatggggagtcttattctgacatcttgggaaaaactgtccacgtgtgaagtcatcaacttgttttccttgtttacagtttgagcagctgttgttatggtgttgaacattttggtgagttctgagtggctcagacatcaggtacaaggattttcccatgaaatttacattgagttgtccaactctggcttatagggcttctggaacagagtgggtcttgctctttgaggttccatgggagaagatggaattggaggaactagtagaattcagggtaatgtccagtctacaggtggataataaaaacacagaaacaatgaacagagctgcaatctcataacaggtgtactacagtattattttccacataatttttctctctatgggcatctctagttttaccaatgataatttcagtagaatatgtttgtttgcaaaataggttgagtttcttcaaacttggtctgattgtttacataagcgcagcaagagtagcaatggaccatgtaggctctcttttaaagttttctttgctctaagtttttttaaggaatctgagattaaattttacaaacctcttgagaataggaagccaaaccaaggctgatttcagactttgcctgcagttcatactggttcattctatctatattcttaatataacatcccagtcaaagccttggtaatataaccaatgatttcaaatgtgtcctgttaaaaagagagaagattgttactgtacttgtgtaaatatctgtattaccataaacatgtcaacactcaggaatagttgcccaattctggggcagtcaggtagagagcaaaagtaaatatttgaattattgttcccagaagtatagtttattgaactgctgtgagctatagatagattaaagaaaaaaaattccataaatctagaaaacaaaccatttaaagaatcagcaaattttcaaataaaaatcataaaaacattatcctcattattatcaattctttcaatgaaatcaatgtttttcctgcttggtctaggctgagaattttatgaagatatcagcctgtttcttaaagttttggaagttcttagacagtccggtggtataatgtgaaaattatcagaaacttgtattagagagtacttgtcagcatcttttccataaatctccttgaaaaggaagcaattttggactgtagctgattggaaatgctttgaggaagaacaaaaacaacatctgtgaatgacaaagattttgaatgactatggttaaaactctgatgagaattcattatgataacacagctcacataaaaagttagttacttctgtggtacatgacattatggctgataacatatttaatttctaggaatctactttttccttcggggattacattaattttgtgggagggttgctggtagatgattagccaactatattcttgcagtttttttctatctcaatgtgtttctaggttagtgatcagtcttctgtcaatttcatcctgaccatgctgcactcagatatttttgaaggctttatgatgtgagaaaggctgactgctattttctgtgtcattagaactttgtacccttttatggttgcatctttttctcagtgtgtcagttgtggtaggcatgaataagactctgtcaggtctccatggcagcttgtgtttctcaagaggattactgagttcttggtggagcacattaatgaataggaccgagaaagtataggcttatgtatgttgaaaaatgtccctaggtaattccagcactcccagctaataattgattaattaataatcaattgacttgattgacagaaggcccaaatcagtgcattccagactgacaacctactttgcatagggtcctcactttcctgaagctcccagcagggatatgaaagcaagcccagttctatgagactctgttttattctcctgggtgactggtgggaagactccccatcagtcttcccatgctctctttgaactgtagctaaatcttctgtctctttctccttcgcaggaatcagatttgcatagtggtcccaaagctccccagatttttaagcctgccccaccttccctcacagacatttttcctaatacattatcctgcatgtctaatctcatcttggatgcatctcagtgggcataaactaacataccaggcttgatttttttgcacttagcttttttctgtctctcccacatgtagccagtaaccatgtcctagtgttttatgtgttacctcttttttcatgtttatagggaaaaaatatgtttccatatacttatttatatgtaatatatataataaaatgtgtaatataaaatgtataataatgtaaaacatatacacattttccatatatgtatatggaaaaagaggtaacacataaaacaccaggacatttacgtataataaaattgacataagttatatatgtatgtagtgtctggtagtcttaccctctttataaatacacactttctatcactgccccttccttccttcccatgtagagctcccatggccaaatctccctatttctccaagtttgtgtcactcactgtcctctgtgctgtgtcccatgtgctgtgtccgcagcctcctagtgttttatgtgttctctgtttctatatatatatggaaaaagcatatacatatttctctgtgtatatttatatacaatatataataatataaaaatatagaatatataacaatttaagatatatacatatttccatatctatgaaaaaaggtaacacataaacactaggccatttatatataaaattctcatatgtaatataaatgccaattttatcatatataaataagtatatacactatagatttatcatatataaggtgaatttggaatgccctgacctgggccctctgtcagtcaagtccttgccatggaggccattcatggctgccacaactgagacaccgagagaaagatgcaactatgaaaaggtgaaaagttctaaagtcatagaaaacagcaatcagcctttctcatatcccaaaattttcaaaaatatctgagtgcagcatgtccaagatggaattaaaaacttcaatcttgaaaaggaaaaaggaagctggaggattcacactttcagatttcagcatctactgcaaagctacagtaatcaatacagtgtggtactggcataaaggaggacatagaaatgaatgacatggaatagagaacccagaaaaaaagcttgcatatatggccaaatgatttttgtcaagagtgccaagaccattccatggggaaaggacagtctttttaacaagtgatactgggaaagctggctatccatggacaagtatgagttgaacctttacctcacaccatatacaaaaaatgaacccacaatggatcaaagacctaaatggaatagtgaagactaccagactcttagaagaaaacataaggaaaaagcttcatgatattgaatttcagaatgatttattagttataactacaaaagcataggcaacaaaaagggataaattggacttcatgaaaattaaaaacttttatgtatgaaaggccattatcaagaatgtaaaaaggcaaactatgacatagggaaaatatctgaaaatcatatatctgataagggattaatttccagaatacatgaagaacactacaaatcaaaaacagcaaaaatacaaaagcccaattaaaaaatggacaaaggactgaaagagagattttattaaagaagatatacaaatggccaatgaggacatgcaaggattctcaatattactaatatttagagatttgcaaagcaaaaccacggtgatacatgacctcacacacattaggatggctttgataaaaacaacatgaacaacatcacaaaacaagtgttttcaagtatgcagaaaaaatgaagctctttgtgtattgctgatgggaatgggaagtgttatagccactgtggaaaaaatggcatggcacggccggctcatgcctgtaatcccagcactttgggagctgagatgggtggatctcttgaggtcaggagtttgagaacagcccggcaagcatggtgaaaccccatctctactaaaaatacaaaaattagctgggtatggtggcatgcgcctgtaatcccagctactcaggacgctgaggcatgagaatcacttgaaccttggaggtggaggttgcagcgagccacgattgcaccattgcactccagtctgggtgacagaggaagacccggtctcaacatcaacaacagaaaagaaaatggtatgtcagtttcttaaataaattaaagcattaccacttgaaccagcaattctacttctggacatacagccaaaagtattgaaaaatatttaaacaggtatttgtacaccgatgttcacagcagcatcactcacaatagccaatgggtggaaacaaccaaaaagtctattgaaagataagtggatgaacaaaaagcaatatccatactttggaatgttcttcaatcttagcaaggtataaaattctgacacatggtgcaaaatggatgaaccatgaagacattatgcaaagtgaaataagccagacacaaaagcataattattatatacttccatttatgtaagatagttagaatagtcagttacttagagacagaaattagaatggtgattaccaggggttaaggggaggaggaatgagagttatcatttattgggttcagaggtttagtatagtaggataaaaaaagctctggaaatagatagtgttgatagtaacacaacactaaattgcacgcttagaaacagttaatagtaaatcttagatgtatagtgtctggtactcttaccttctctataaatacacactttttgtcgctgttcctcccctgccatagggagcttctgtgagttaatctccctatttctccaagtgtccatcactcactgtcctctgtgctgtgttccaggagctgtgtccacagactcagacaggcagtgacttcagagccaggacacagtcctattcccattttttaaagccttacccatgggaggcttggcttctactggccactcgatttagccagattcagaacaggccaccgaggcaccttatccacatgccctggccccagcccgggtggagtcagggcaggggcagtcactgggtgagcccacagcaatgcagggagcagtgtccgagctgcttctccctcacccaaggggcttcctcctctcatttggggaaaagtgtgggcttgttttgaagcctctgatgttcattgcagctcatggtgtacacacacacagacacacacacaaaggagacagaagggatgttttggtgacagaaacagcttgaccatgaggaccctcctctttctccctctgtgaaggcccttatactgcatagtgcttggggctgataaagccatttccctacatttctcaggctggacccaaggtcatccaccagaaatccggaaaacaaagggaagagaatctgtagatatgaattgggagtgttcaggagaaaaatttgggatttacttttgtgcatgggacacaggctgagaataaaaatgttttcctggctctttcttggaaagccagataggcttcacctgaaagcatattgccaatgctccagtgatccacttacaagggactctgattttcttggttgcgaagtttttgccattagtgactgggttatggacataacacagatagtccccactattttcagtagtgacttgggggataaagagctcttgtcctatttgttggttattcccattcagcagccaagaatactctgctgatggattagagcccgtgaggcaggagaggttgaggtttgaccctggatagtaacaggtgtctgaagaataagttgtgggttcatctgggccatctggagcaaagagaataaagccacaggtaatgttatcagagggaatgggaagctcctggtctgtgaaaggggcatagtgttcctttttgccaagtcacaaccccgaagtcccagccaaaacttcctctgtgttcactgaactggaggagtcaacgacattcacctgtttctcccatcgcaagctatggaaccagagtcccctaagaccggagaagcccctcccttcctgggcctacccaggtttgcctgggacaggaagtcatggccagcttgggggtccaggggtaagtgtcttcatacttggacctgagagggactgagaggcctggcctcatgttatgtggatttgggctggcagccttgtccatgaaggaaaagaggatactcacagagaacatccaggagactgggtcactgtggctggtgctcactatattcttcctttgacgttcatagagtcctttgtcactccttgtgacactgagtagagcaaggatcctgttatcattggacatctttagcctgggactgagtgtgagtctatgactatttacccaccacatgtagattgtgccatgagtctcaggttcacaggttaagaccacagcctcctcatcctctgcggagttgctggtgacatagggcttgggcagattggctgtgcagataacagagaagattcccctgtgtggcatcattgatttctccatgagcgttttccaataagagttgacatctcccacctctcagccaatccaagtccttaaaagcccacagcaggtctgtgtgtcaaaagacagatggatgcatgatgatctgagggctcagaggccatggggccacctgctctgtgtgcaagatgcacagacttctgaagtgtggatcgagcagcaatattggtgaagtgtgaattgagcagggtcaaacaattagagtttgattaactttgtttaaattgagaagagtccaagtgaggcagcagtggctcatgcatctccccaactgaaggaccccaccttataacactgttgttattatgaatacacaggtgtgaatgaaacaggcagtaaatcagacagcacccacctggccagctccacctggtcctaagaaccaccagtattcccattatgtgtatgttacagctttttaggctacaaaatataaaatacaatcacagaatataaaatatgctactgtcaatacaaaacattgaatatgaagctgaatatgttgttccactttttctcactcttgttaaactttgctgtttcagttttggaagtttctattgacacacacttaagctagagattctttcctcagctgtgtgcagcctacgagtaagcccatggagggcattctttatttctcttaaagtgtttttaatctctagcatttcttttgcttctttcttagaatagccatctctgtttaaatcacccatctattcctgaaaggtgtctccttttaaaatcataatccttaaccagagttgttttaaatttccagtctgataatttcaacatccttaccacatctgtgtctggttccaatccttgctctgtctttcaaactgcatttttttttttttgccatagtctgtcttgtatttttttgaaaaccacacatgatgtactgggtaaaagggacttgagtgggcaggcattcagtgacacggtggtgagtgtggggagggaagggttctgtggttctggatgaggtctgtgtcctgggctgtgaatgtcacaagtgcccctcaggtttttctttccattaggtgggatatgatgacttgaggaggctggagttggatacttcccctccctctggccagttaagctcctatcaaaccgcagctaattaggctgcagtgaaatagtttctcttaaatgtaggtcttaccaagaagaatataaatcactgacaactttccaagtgtttttttcccttcttccaagaagaaggatgtggattcttttttgatattgactgtgagaacctggtagagctccaggagctaaaagtcataaaactgtccccctactcccaagactaatccatcctctggtttgtttatctctgcgctgtgtccacactgagcctccagaatttcctgaattacagttcaggttttctgaaccccagcactggttcccgctggggtttctgtgcctgtgtttctgctcaggtacggtgcgctgctctgtatttgcctgtgggtctctccaatatgtgggccagttagcactgagaccttgcttcctgagaaatctaaacgagttgttgatttttcagtttgttcagctttttacttgttgttagaactgagtgaaaatttttaagctacttacatgcctgatggaaattcgaagtctctagggcatgacaggaggatatgagccccacagcaggttgaggatggagtcatgagtgaaatgggtgaaatgagcccacgggctttggaaactgcagatctgtccttctgcctctgaccccctggtgagtccatgtagaaagtgaaaccacctttgcaaagcatatgatggtgagaggaagctagcttggctgaccgcatctcacctctagcctcaaacttgctctctttgattcctgggcataggccagggtaagcatgggaggaatttatagtttaactttgaagcaaggatgataatagtccctccctaaaattagctcctccttgtcgggggctaccttggtaaatctaagaaaaaagattgaatggtctcatgattcagcaggttgtagagtaagcatcattctggcatctgctcagctttcgaagaggcctcagaaacttgcaatcacggagtaagccagtggtggaggaagacatcttatataatgggagctggaggaagagagcaagggttgcacactggtaaacaaacaggtaaaaactcacttttgctacaacagcaccaagaagaatggtcttaaagtatgagaaaccacctccattatccaatcacattcaaccaggctccacctccaactttggagattacaatttgacatgagatttgggtgggggtaaaggtccaaaaaattattattatttccatggtccctcccaaatctcacatctttctcacatttaataatatgaggatggcttcccaacagtctctagagtcttaactcattcagcattaactcaaaagcccaaaatagcaagtttcatctgagacaaagcaagttccttttacctatgagcctgtaaattcaaaaacaagttagttactttcaagacacaatggaggtataggcattgggtaaatactcccattccaaagggaagaattaggctgaaggaaataggatacaggccccatgaaagtctgaaagcttgcagcacagtctttaaaatttaaagctccaaaataatctcctttgaccccatatctcatattcagggcacactgatgtaaggcttaggcttccaaggttctgggaatcacagaaacattccaagagagtgaaaaaagaatttgtagtgtggcttttgatgctaaacagcgtattagactgagtaagtcactgaagagaaaaaagtcagaggagaagatgggtgagggtgacagaaatggaatggtgaaaggaaaggtctgataaaaatgtttaccggctggacatggtggctcacacctgtaatcccagcactttgggaggctgaggtgggcagatcatgaggtcaggagtttgagaccagcctgaccaatatggtgaaaccccatctctactaaaaatacaaaaattagccgggcgtggtggcatgcacctgtaatcccagctactcaggaggctgaaggcaggagaatcacttgaacttgggatgcggaggtagcagtgacctgagaacgcagcattgcactccagcctgggtgacagagtgagactccatctcaaaaaaaaaaaaaaaagtttacccaagggctcatctggtacctggctctgtgactaatgtcttacacattttgatttactcttccactttcattttctgatgcacaaagggtcacccttctgctgaagatgagaaaagaggatgagggagctcaaatgagtggtctagagtcatccagctacttcatagagcttgtgtgtttcaccttgatgtttgtgcacagacagaaaagtgagacacagaaggaaggcaaagcaagtttatgctgttggtgacacttatgaaagttacctgtgttggcagaataatggactcctaaaatgtttgcaccctagctccagaacctgtgcatttacttttcttggtaaaaacacagtgcaggggtgataaaattaaaatcttaagatgtggacgttgttctagattatctgggtgggcccattgtaatcagaagtgtccttgtaagtgacaaagaaaagcaggggcatccatgtgagaatgatgagcctgtgaaactccactggccaatgctgggtgtgagcatgcatcaaaagacaaaattacaactaatgtagttatagattttatttttcatttattatttgaggcagctctcactctacaaatatagtgacagccctccctgggctatacaataacaaaacagtgggttttgtcaagtgggaactggtaaacaaagccatataaataaataaattggtgaacttcaggtctcttttctgtaaaagttaaagcagaggaaacttttattctgctgtctcaggtagagtggaacctcctgttttcaacaaaaaacaaaagtctgttctggtatctctttgcttcattaaaatttcagttgtagactgtagcatttagcatgagtggttctattttggagtctctaggctctcacttaggtgagagtgtgaccaaaatttaaagcattggcattcatctcagtaaccatcatattgggcttccatcatttataggtttatgatgtcttcctgatcacacatttctttgagtttttgtcatttcagccaaagagagaccctttggtatttgttgatggctgcacacaaaactttttaaaaacttttgtagaattcaccacaccaaaatgtagaatttaaaaacctatagaatttatcacaccagagaggctactaatatgactattaggaggataacaccaaaagtttggagtatgcactttaggcaagatgcaaaccaactaaaatagaataggtcaaagaatgagccagaattgtctagcaattttaaccaagtagtatgtttggtaacttctgtgattgagtcattattatactcgatatatttgtttatgtgcaacagtcagtgtcagaaactgcacaggctcctccctctttagctggtagggaacaattttattatgtagcattcaatggctcattaaattaaaacagggagtgagaacaagtgagtctgaaaatgtaactttaaaagggaccactgtacatttgaagaaacaattgtgttaaaaatgctgctaatgtcagccattgggtggactaaatgatatcttatgtaaaaatttgagggtgacatgatatatctgtcactctgttacgctactctcagaagctacttcacgtgagattctaatgataccatcatcctgccaagtgaaagaggcaggcataagcatggacaaattaagaggggtaagagcctgattttgatgtgaagacttgttctggcaacttaggaaaagcttttcacagtgtgaagttgtcaacttcttatcctggttttaagtttgagtgtctgtagttatggtgtcaaacatattggtgagctccgagtgactcatacttcaggcacgagggttttcctgtgaaatttacattgagctttccacctccagcttataggacttcagtaacagagcagattttgttcttactgattcaataagaaaaaactggatgggaggaactagaagaattcagggtctagtccagtctaccggtgaataataaaaactcgaaaacaatgaacagagctgcaatttcatagcaggtatactacactttttattttcaacattatttttctctctataggcatatctatttttaccaaagacaatcccagtaggacaaatttgtttacaaagtaggtttagtcttatgaaactttgccgggattctttacataagtgcatcaagagtagcaatggaccacagaggctcttcctaaagtttggttcgctagaaatttttataagtagtctcagattaagcttttacaaacctcttgagatgaggaagccaaatgaaagccatcttcagactttgcctgcagtacttatgggtccattctatgtatattctcaaatataacatcttagtcaaagccttggtaatataaccaatgttttgaaatgtgtccttttgtaaagagagaagattcttactagtgcaaataactgtatcatcataatcatatgaatactcatgaatagtttcccaatcctgggacagttaggtaaagagcaaaaatcaatgggcttcaattattgtttccaaaagtatactttgccaaattgctttagatatagctagcttaaaagaagaaaaattacataaatctggaaaaaatcatttaatgaatcagcaaattttcaaataaaaattataaaaacattatccacattatttatttcaatgaaattatttttgttctgcttggtctaggttggcatatttcatgaaggcatcatcctgtttgttaaagttttggaagtctatagacggtccagtgatataatcttgaactgctcagaaacttgtatgcaagagtacttgtcagtatcttttccataaatcttttgaaatagaagcaattttggactgtaggtgattgcagatgctttcaggaagaatcaaaacaactatctgtgaatgaccaacatgtaaaatgactattgctaaaactctgataagagtttggtataagaaagggagtaactccagccagtactccagtcatgacgctgacaggggccccaactgagagaccaaaagaactttcttatcctgaagcagctgtcatggaaaaaaaaagaggagaaggaataaataataaagacagcaaggattttagccaattaatttttgagatagggtctcactctgttgcctaggctggagtgcagtggcacaatctcagctcactgcaacctgtgcctcccaggctcaagccgtcctcccacctcgctctcctgagtagctgggactacaggcacacaccaccatgcatgcttaatgtttgtattttttgtagagatgggcttttaccatgttgttgaggcttgttttgaactcctggactcaagttatccacccgccttggcttcccaaagtgcagggattacaggtgtgagccaccgctcttgctgctttcatgctttttataataagaatgaactccttatgtaataataaataaataaatgaaattatttgctttggatgtagcaaatgtagacttagattgtccagagtcaggagctaagcctcatttttttttgttttagctcagtgtagagtgcattgaaggtgtcctaaaaataattccatatagtaagccaattttaaaccctgctcacagctaaatctgccaagtatgagccaggtaaaattaccaaaaaaggtggttctgactgattccttaacaataacgtggcttacaaacaaagactgatatgaaatagttgatccaacccaaacactttgctcatttcccaaaattttctatacaaacatatacaacttaccacaacataaagatcataatgaaaagtttgccttttattcctttaaatgaccatatgtttagatctgatgtactgacagcaataattctcctttaagcggaaaactaataaaatttgaaaaatagtgattttatatttagatgatactcagatcttctgctacgtatgtggaaaatggaattattgctagaaacattgtttaaagattagggtatgaaaggagtattaggaagtcaggaggttctttctttaggaagcagcttatctggattcattcaaagagctttaggttagtttgaggtctttctgcaaaatgtaaattgctatatgagaaactatatatagtccaatgatgaaagaatgcaaagccttagaagcacaggcgacaattccagtatcttccctaaagttctgacaaaaaggaaaataactatcaaattcttcaactcgaatgcttattatgtatgtataagtcagttgtcagatgaagagaggctggaaatatgacttctacccctagggaactcacagtcttgtgggggccactaggggtggtggtgtgacctgcctggagcagggctaagtatggacttgtgagtcaagggctatcaaaacctaagtaaactgattgctgttcagagaaggtagagttccatttcacagtttgcaagaaggactatttcatggaggaggtcacgttggactagacctttaaaagttggtagaatttaaaagcaaggatatggaagcaggaagagtgaaagtgagcagaggtacagaagtgaggcaagggtgagcagttttaattttttaatggtggtattataaaacacacatcaaaatttgccatattattattattattttggagacagtgtctggctctgttgcccaggctggagtgcagtagctcaatcatggcttactgtagcctccacctcctgggctcaagcaatcctcgtacatcatccccctgagtagctgggaccacaagcatataccaccatgcccagctaatttttatatttttgggagtgacaaggtcttcctatgttgcccaggctggtcttgaactcctggactcaaatgatcctcctgccttagccccaaagtgctgggactacaggtatgagccactgcacctgaccccatcttaaaaatttttaagtgcacagttcagaaatacatttgcattgtgcaaccatcagcgccacccatcttcagagaatatttttcatcttgtaacagggaaaattcatatccatgaaacactaactcctcattcttcctcctccccaccccaggtaaccactattccagtgtctctatgattttgactgctctagggacttatataaatgagatcatacactgtgtatctttttgtgactggctgatttcacttagcataatgtcctcaaggttcatccatgttgtaacatatgtgagaatttttttccttttgaaggctgaataatatttcattgtatggatagaccacattttgtttatccattcatctatccatggacacttgggttgccttcactttttggctattgtaaataatgctgctataaacatggaggtaccaatatctgtttgggtctctgctttcaattattttgggtttatacccaggagtggaatggccaagtcatacagtacctctagttttagttttctgaggaaccaccataatgtttttcacagtggctgcaccattttaattcttatgaatagtgcacaggggttccaatttttccacagtctcattaaaacttattattttctggggtttttgctttgtgtttgagagtagccatttaaattggcataaggtataatttcactgtggtttatattttcatttccttaatgattagtgatattgatcaatattttctatgcttgctggccatttgtacatcttctttggagaaatgtttattcaggtcgtctgcctattttgttaaattgggttgattttttttttctgttgtttaggtagagaaggcaatccttgaataccagtgatgtttcactaatgctgggccattgatttcacaagaagttgtatgaggtattagaatgtgtgtttggtttcaatcatggctgaggttgaatgccttttccaaaattcagtgtgaagccacaaaggatccaggagcaagaacatggtgtgactgctctctgctaaagaatttcagcctgatgacagtgagcaggctacacatgagactgacacaagaacaggtggaaagggagaccttccactggaaaaaggtgattctaacatgcagaatcaccttcaaggagcaagtaagcagaaaaatagacaatggcacagtggccaggcaagaagacactaggtccagaatctgaggttcaaatcctggctctgtgagacaacaacatgccttggtttcctcatgctactgaaacaccaggggttggggctaggtcccattgcttgctgcacagaaagccaaccactgagacaatgaacattgccagggaagaaggctttatttggctgctgcagccaaggaggtgggagatcagtcttaaattcatctctccagccaactcaaattggatggtttatatagcttggaagggaagtaactacctgcagggaaaacagcaattaaggagggctaaggaagcaatcatgataaatgaggagtctggtgtctcattgtctgatggtgatgtggtgagtttcagtctcttgcctgaaggtccgtttcctaactcagatgactgacaaatgttaagtttcaagttttaagaccagatgggtcaatttctatgtttattcaaaaaccctgtaaatatcagttctatgtggaacttgagctggtttgcccccagttatcacagttagggttaaatgatgcaatataagtaaaacaccagcagtttctgacacacacacagagtgcatgacacaagtggtgtgttgggacaatatagctcagtgaactccctttgtctactcagttatattgagtgatgaggcatctctgaagatgccactttgctacttctcccctgataatttcaccagatccagccatatgagcactgcaagtggggacttagcttaaatcattcctcgtatttcctgtgcaggcaaatcatttggcaccaaaacaggcacagaagtccaagtcctgctgccagctccacgactgatgacacagacagactttgggattagtcctttaatctctgtcctctattaaatgaaggtcatcatgctgctgcctaatgtaaaaggattgtggggattttcatcattcattaccgattatcttattctttgaaaccccaagaaaactatacaaattccaaagtctaataggtacacaagggctttattatggatgatgaaatttcaaaggatgctaaaccaaaaaaaaattgtttttcttttttgagacagagtcttgctctgttgcccaggctggagtgcaatggtgcgctattggctcatggtaagatccaccattctcctgtctcagcctttggagtagctgggactacaggcacccaccaccacacccggctaatttttgttgtatttttagtagagacggggcttccccatgttagccaggatggtctcaatctcctgaccttgtgatcagcctgcctcggccactcaaagcactggcattacaggcatgaaccaccgcacccggccaaaaaaattttttttaatgcgctctcttttccatataatcccaaggttggtgaatcacctctaagtcaggagtttatcttagctgatactgccttagtgttggcacaacttaaatttagttaaactaatatttgcatgatctttgcacaacacataaacacccaggaacaggtggtgctcctcggtggtcaacaccaggatggctatggcagggcacattctttctctatagcccaggccactggcattcaaagaaatatttttcaatgtctgatttttctctggaagtaggaaaatgctttcctaactgctttacttataagggtgtttcttgctaattctgtgcccagagtaactaatggggacatagacatagacatcattcaaatggcattctctctttaccataacccatgctttaaaatgaaataaactgaacccatgccttaagacgacaatcaagaaatacattctgcctaaggaaaagtcctgcgttcaaaggtttttgtccaaataatctgacattgtggtcatgaaacattgaaaatagcatttggagcagtaagtataaaaatttagaaggagtaaaactacttgaatgcttgttgggaggtttacaatgtagtcaaacaccagttaagcaaaaataaaatttactacttaactatttacattttctaatgtgtggtttcatggaattgttgagataaaagtagatactgaaataggagtacttgaaagtaataagacagagatttttataaaatcatttctgacctgattaagaaaaatataatctctatcacatatgaaataaacacctttagaaaaatgcaatgtcaaagaaaacacttggaatggccaacaaatatctactacagatagaaatgaaaatatttatgttatgtaaatgtcgggtatcaaattgtctccgaagttgccttctagagaactttgtttagttggtatattcttcctatgaatcaaaggaatacagtgttacgatcataagtcatgagggacatgagacaattttaaggatttaggaaagtagggaagcagtgaggtgaagggtaggcagatacttcagagggtaaaaagtgtttttgattcaaaagaaaagctaaggtagtttgaagaaaacatgcatcatctactagttaatctggggtacaatgaaggtggtgttattttaacagtgttcagaaaagaccaattaattctgtggccatacagaaagaatggaaagattgcataaaacagattctgaggaatacaaatcaatatagcaaggaactttatgatgaaggacgaatgtgagcatagaatgcactgtttttttaattattattattagcagcatcattggtttggtgatgttacctacttttggagtggagctagatatgagagctgcatgtcccttgaactttatttggggtaaatagtgaaaacaatatctatgatgagttaatggctgcagcacaacaacatggcacatgtatacatatgcaacaaacctgcgtgttgtgctcatgtaccctagaacttaaagtataataaaaaaagaaagaaaaccatatctaaataaaaaagaaaacattccagaggtgcagaattcaagctagaagaattgtgtccttggatgtcccaaggtcaaattttaatatgtcattgaatgaaggttccaatgtttggaataatgaaaacagtcatattgaattttgtctttgctctcctccctccccagtgtctaccaaaaaggctgagtaaacattcatgcaagtcaatacactgtcacagccacaattcatcctagcagtctttcctggaatagtcacttaagacgtatctggtgaggacccactggcacttttagagcaatcagaaaatacctcaaattgctcacatctagtgtaggagaaggctaatccatccctgtttcatgaagcatcacttcaatatcctggaacagtcattctacccaaatcttctgtccctagagcccaagactctccgcatcttcatccattcttcacggggcttgatttccaagactctctaccatcttggccacacaccatgttacgcattcactatggacactgcaccactgcggatgctgcaccaagggttctgaatccaagggcagattgttatgaacagcccctttaaaagtcttaaacgtgatacactggtctgtcagcagatgtgcagagcctcttatgggagacacagtttttgactcatgtgattcaatgtccataaatctgcatccaaaagatgcccatagagacaaagagcagagtaaagtccttgcagcagtgtttctcaaacttagccacccaccagaactgcctggggaactttgaaagatacccatgctgaatcccacccaccaagattctgatgtaatgctatggggtgagatctggacatcaggatgtttggaatctccccaggctcatttaacgtgcaaccaagactgaagcccactgtcctcagcaatgtgcccagcccagccttcctgacatccccccatgggtacaggatgacagtttctcactctgaccctttcctttattcaatacagcacagcacaatccaacagggtgagcactgttatgacagagaacctggagtcggatctgattaaatgtcttcaacaaaaccagtgccaagccttggccattcagctatcaattactattttcaacccaggttctaaaggctcttcattagaaacttctcgggttgataatgattgggcaaatgtgccctttggatttgattgctaccatgattattaattaactgaattgtagagatatcgagtacctttctgcctcttgtttttaagaacccatgagagacaaggccaattgcagacaatgaggacgtcctcatgatagtgagatgaactgcctagctatcttccgatatcgttacttcccaccagttttgttgcttgcaaaacaacagaatcttctctccatgaaatcatggttatcagttaggaagtagcccacttggttctggatttcgtttagagatttaagatagtaacagagggtgcaggatgacaaacagaatttgtacactgtgtctggtagtggaaaatacccaacattgtactgtatgctgactctgtcatttcctgccttctctcctccttttctccctccctcactccctccctctctccctccctccttccttccctcatgaaagcatagcttgtttgccattctttcctccagtcaccagccatttacttatgcacatcaccatgctcatgccattaccaggggactttctatcagcatgaagacaagaaaatgcctggggcagaaagggtgtggggagcaggcagcacccctgcaactgcccggtagcatttatacattgctctcccaccttggtttctatccatagctttcctcgtcagagcatgttcactttaacatcctctagagcaatttcttggatccttcaagggctcaagaactaaacataagttcaaaagaaactgagtaggcacctaccttctggaaacaacatccatagaaaagacttgattgctatggtctgatttatgaacctgtggctcatatcaaggttagcatttgcactagcattaaggtattttcattgagataatttatgttttgaaagaaatactacaagatcaagaaactgtatcagttggagaatagaagtgtgtatgatttgtgtatataaatatgcacatcaaagcatttatttatttcagagagttgtataacaccatcagagtaaaaattgagtgattctcttctatttctgaccctacttccaatgtcttctctgtccctctgggcaaaaccatttaaaccttttatcttggtttcctttgtgagaaaatggggataatagatacccctgagccattctggagacatgtttggatgccagcccagttatatgattataggagaaaaaagctttgagcttttggcacttaggtgccacataaagattattagcaagctgctgaggttttatctttggaaactaataagcatttctcctctaaagcctcaaatctttagcccctggacacatgttcctgatagctctctctttacaaagatccccttggctccacaaggatacagatagtgctttgctgagagagtcactaccgcacattcagatgaaaggtattcattccgcttggcagagtcatggttagagtagctgctgatcccagcaaggcagggtgggtgatgggaagggattagattaggaagaaaagggatcctctcattctctcactgagaggactttaaacctgcagaagcacaacagtgagtggactacgtgtatgtgccaacgtgcaaagtcgatggtgcacacgttacaggttggctcgagacgatgccactcagacctgagtgcaccgtggaactctcttgaattctctctgcaaatgggttgccctggatgtatagagttattctacaggagtcctgctcctaactcatcagaaacgtaatgtcctctgttgatctcaaaggcattttcttctgttaaaagtattgtccattcagcaatatggagaaagatcatttgtgagaataaaatagaagtgtctgatggtagtggggggggtgtaatttcctccctatgtgagtagcattaagttcactcttaatttttttcttcatttctgtaattggagactgatttatcaagaggatatagaattcagtgactaattccattaaatgctgaaagaataaaataaaagtagaattcaaaaggcttactcctgattagttttcaagatgtgtctaggtacaggaagttaaaaataataccacagtgaatgctctgacccagtgctaacaaaagcttcctttttttggtgagacttggcatagaaaatcacacatgtcattcagtggtcctgaaaaatgatgactgagatttggactggttttccagggaataaaattgagtgactttttaaaaagttctactcctagaatctgggatctaatcaatccaatatcaacttcaagggaatagaccaacaaccagagatgaaattagaagaaaaataattagaatagcaagcataggctggttttccatgctatgattctgcagcaaatgtggtaatttgggaatactgatttgggggatctcttgtcatgggaataagttgtgttttgtcagctttgctgagtgtctccggtgagctaaaagtgattaaaacagagtgctggccctggtatgtaagctgtaatctatactccatatctaccactagccattttgaaggaggagagttccctgatccatctcacatgatgtgcaacaggcgtgtggctcgcccgcttggttgctcaaacccctgatgggagatggagcacacagatgggcaggtgcaggggctggagtgagtgctttgggctccagcctggcagtagtgtctggggagagggtgttcctgcagcccaagtctctttagtcttgctgtctgcaaatggcttaagtgttaaccggctcaatagaccctctgccttttcacaagggcagagggccagtgtgacagctttctgtattcccagcttttgcccagtgttctagaagaatcgggtcacacacacaggcttgaaggatgaatgtgggattttattgaatggtggaggtggctctcagcaggatggatggggagctggaagggggaatggagtgagaagatgatcttcccctggagtttggtcatccagcagccaaactcccctctgaccacccccagtttaactcctggcattcacacgttccttcccttctctctttctctgctgtgtcatctgttgtttgtctgcttgtctcctcatctcctcatctgcttctggagcctggggtttggggtttatatgggtacaggatagagggacatggcaggcaagaaggcaacttttcccacttagggccacgggtctccaggcttgagggtggggcctttgctggggaactaccttctttacccagtatttccctgtctcctgtccatatcaatttcatgaatgtgtggtcacaacatgaacccagaatttggaggttggaaagtaggagtgaatgcactcaatctaatagggtgccaattcgtagcatctaatttggtaatgatgaatgagtaatagaatcttttggtaggggcagacttggtgaatcttcaaatgtagcaggattttaaaatgaatcgaatactatctctcagtcaatacaattacctccaccactcctcagttcctaattcaagggttatattttcagtaactttatgtattcaaaactgtattagatgctggaaatacaaagatgagtcagacattattaatctctgtccctaaaacgatgaaaactagtgtggaagacagccaaaaaattagagattaatcttatctagaaaattctagaaacaggatgaagcacaacagaggagtattttaggcaacctcaaggcatttaacacaacctggagcctttagttaggttagaatatggccaggaaccggaagtcaagattcaacaaattgcaacactgcaataataactaacatcactttctaatagtgtttatagtgttttctaatatgaaatcaaaatctgtctttggataacttttactcactccctggtcttgtttctgttctctgggatgacacagaatatatggaattcactcttactctgcttagtactgagaaagcaaaaattaaataaggcattcaaaattcttgtctgtatatgggccaagggaaagcttccccttcaccctctgaaggtttgctgataaccaactgacaaaaggaagattcacaggagaaaaagcttaaatatttatttgatcacagttgtatatgacatgagagcctttagaatgaagacccaaagatacagaggaaaccgtccatttttatgcctaggttcaacaaagtatggacagccatgtagaaatagggttggattcttcttggcctctctgagcagtgcttcttccttctgggtgtgggaaaaattcaccatattccttaggtcccttcaaagtcccctctattcactctatttcaggaagggtgagaggaccaatgaataaccaactttctggaaagggggtcttaggatctacagtcaaacaaagtaggtcaggtcatttcttcttttgttttctcttttcaagaggcagggtctgattctgtcacccagggtgaagtgcagtggcctgatccatggttcaccacagcctcaaattcctggactcaagcaatctgccagtctcagcctctgaagtaggtatgactacaggtgtgtgccaacataccagactaatttttaaaaatttttgcagagatggagtcttgcagtattacccaggatggtcttaaactcctgggctcaagcaatcctcctgcctttgcctcccaaagtgttgaaattacagatttgagccaccacacccaacccagataatttctgtatggccagtttttacacagaaaggtagagggaaatttagagtccgatttttaggttttatggctttggggaaaaggggttctggtttctaggacccgtcatggggaagagggattctagtttctaaggtgcctccagggagaatgggactcagagacaggaaggcagaagaagctcagagagaaagttttgcttctgaggctctttcagaaggattccttgagctcaggagttccagaccagcctgggtaacatttcaagactccatctctgcaaaaaattttgaaaaaatagcctggtatgtggcatgaacctgcagtcctaactacttgagaggctgaggcgggaggattgcttgaggccaggagtttaaggtgtggtgaacttctgaggctttgattttggggtactgctttctgagccttagacctagaaccagtattcaggtcatgggggaagttcatataagaatctctattttttaactatcaaactgtgacttccacatgggccacttgggaatgctctcacccatagacctgtcatacacctttgttgggtagggacaggaaaagagattgagtagcataagataaagtcctcccgaccccacccatttcaataatgggatccgcatttatcatatgcagatctgagacccttcctgaacttcaggattcatacagtattagagagtggtctatacctttccccatgacctccagcccacacgaggttcagtgaccctaatgccacggaggccaggatgctgtgattaagatgagagcaggggtaagaagggtcttttctctgctcatggagcactggaaggaagtatctttttgggtgctggacagtggggaggtcaagactgtgggcagaggaacactggagccaatgttgggaataattctcatgcaagcaaagacgtggtgtttagctggtcacaaccccagaccttgagactccagttccacaggggtccaggatattgtttccatgtacaagatccatctgtgagaatccagtactttccaccacctgccgtggtatggctgtggtcccatgcaccatcaccttgcgcttcaacttctgcaatgaccccctaattgataacctggctcttgacttgaccttacagcaaacattctttttgaagaaaagtcacagagcttcaccccactggccgaaaccctccactattagctgccactgcacacagagtcgaagcctaaggcattgcacttacacattttcatgttatattgttgcatagatgttgttagtttctgagtagccaggagagcattttttctgcaattaaacatatcgaatgcaccacattctttaggtcccctcaaaggcccttctattcactctatttcaggaagggtgagggaaccggtgaataaacaaaggtccttgctttaaaggctgttatgaccataaagtctgtgtatttcacagctcatgacagcagcatcctgagatattatttattgtcaaacttctcttctcaggccacacatcccattgcaatggggaatgggacagagcaaattgcaagttcttggttctatgttccagttgcaatgttgctttcagttttcctgctgttaaaacagcttttgctggtaggactgtgggaagtgagaatagatttcattttacctgctgtgcatcagcagaaaaaacaagtctttcttttctcctagcagctgagatttctcagagttcttcctagaattggatgttatatatgatctactttactcatgccaaccggcatacacaccaaagcctgatgagtggtacaaacccacccaatgttttcccccaaaacagaagtaacataagcccatgtggaattgtcagaggtgtttgaaccagagcaactgcatcttgaataggagcagggtaaaatgaggctgagacctactgcgctgcattcccagacagttaaggccttctaagtcacaggatgagataggagatcggcacaagatacaggtcataaagaccttgctgataaaacagtttgcagtaaagaagctggctaaaacccaccaaaaccaagatggccacaagagtgacctctgggggtcctcattgctacactctcaccagcaccatgacagtttacaaatgccgtggcaacgtcagaaagttaccttatatggtctaaaaaggggaggcatgaataatccaccccttgtttagcatattgtcaggaaataaccataaaatgggcaagcagcagcccttggggctcctctgtctatggagtagccattcttttattcctttgctttcttaataaacttgctttcactttatggactcgacctgaattctttcttggtgagatccaagaaccctctcttggggtctggatctggacccctttcctgtaaaagaactattcattttatcttttggtcgtcaccaagcaaacacaattataaataaggaaaataatatatgattgtaattttactcataatcccgaatgtctctcatgaccagcacacctttggtgtattgggtctaaatcaaagaaaaattcgaggagttgaatgaacgacgttttgatatcttaatgcattttggagaaaaccaactgttgcaaaaagctaaagaaaacaaaaattcattgtttatagatcaggtcacgtgtttttcatttctgcaatggcgatgtggttgattcccatggaacacaatgagagtgtggtctcctttgagattgtatttattgataaatgcaaaaatgctaatgaatgctaacttgctggttctccatggccttccttcctccctccctttccaagaaggatgttgtatctgtcagaggcatttgaaccagagtggctccatcttgagtgagggctaggaaaacgaggcttgaacttgctggtcggcattcccagaaagttaggtgttcctagcctctagatgtttacagttaagggaatagattgataacattcactaaacagacccagaattgggagtgtcctgatatcccgatatcttgagaacagaagcattcctaattttgctttaaagataataacgttgattcttgaaaaatatagtaatttaaaaaattaatcctttatcacaaacccttgtagcagagcacatctccccatgatctttttaaattctctatataaacaagcactgtacctaggggttggtgtgttccttctcttactttctggaatgccctactctgtctatggagtcgctgtactttcaccactttactcttttaataaacttgctttcactttgcactgtggacttgccctgaattttcttgcccaagacctaagaaccctctcttggggtctggatcgggacccctttcctgtaacatatccacctggtcaatttaggaggcagctgttatgtttatcaggatgaagaaaataaaactcttttacttcaaaatgtatttctatgatatagtttgagatggctgttcagaaagccagcaaacaggaggggccctgcaaagctgtcttgtatggggcgatttgcatctgcagataaattctgcacggatgcagccaggctttctcagaggccatcctccctcgtcctactgtaggaaagatggacagagagtctgacatctttaaaggtctgaaagaaacattcgccatctattctctctgaggcctgctacccgggaggtttcatctatatgacaagaccacctcggctagcttggcctcttcttctctttctcccatagcctgtgttgccacaatgcgagcctccattcttcaacctcaagatggtgtgaaatcttctgcactccatccggggcatggggttgggtaatcaccctatgagttaccctacgatgctccctgtgttcaggagagtatatttgtttgacttttctccaattaattttgcctttcatgagtttattttccagcaaaacttcagagcaaaaaggaaggttttaccttggcctctgcaatgataatgagttcagatgtaacatgaaaaatttaggaaagattgggagaattttttttaaagatccaggaatttatcttaggggaaaaaaaaggaatagtactggaaggaggatgcaggaagaatgagagagagagagagaaagggagattggggcaagtgaggaggaaggagggtttgtggacgtctgacatgctggagagataatgaggagaccagttgggggaatatgagcttaagaggttctagtgtgtgcctattcgagacactggagaaacaatggaattattttttagagcttctctggatatagaagatggtttccatttgaatgggatgccaccatgttgagccaggaaataaggctttccttaaaggggctgcttaccacagacattgattctctcgcagtcctggaggctggaaatctgagacaaggtgtgagcggggctggttcctcctgaggcctctctcctgggcttggagatgctgtcttctccctgtgttctcccatggtggttcctctctgtgtaggtctatgtcctcatctcctcttcttataaggacaccagtcctgttggattagggcccactctagtgacctcgttttaccttaatccaatcttgtccattctgcagccctagggccacatgcagcccaggacagctttgaatgttgcccaacacaaatacgtacttttttaaaacatgagatttatacacggacctgttttttcgctcatcagctattgttagtgtattttatgtttggcccacaacaattcttcttcttccattgtggcccagggaagccaaaagattggactcctttgccttaatcacttctttaaaggccctacctacaaatacagtcacattctgaggtcttgggggctaggacttccatggatggattgggtgagggggcctcgactcagctcataacagcagagttctaatggtggttctcagtctttgttttgaggaaagtggtcgcttaaataacgacatatggaaaagatacaatttaagtaatagagacttcccaggcaaaccccatgtaaggggaggaatcgaacgtatcaagggcattccccaagcccaaggtgatagaggtgagaaatgctcacttattagtgcctatttcagtctcctgatagattttcatttagtatgctgtaaacaaaaatatccctgcagacactggcacttgagggattacagtggtgaggagaaattcccttatttatttgtggaattcagtgaagcatttcacagtccaccttctggggataatctgttcattgccatggagtaaatcaatagccttcatttagattcttaactggcaatttgatctcattcactttacccaacactcattggctggagggatgttggagactgggagcaggctcctaaaaagggtcttgaaaatgttatttcaacaaagattaattttgaggcattgagagtttcagaaaggttgacttttttttctgaagctcttctaagccaatcttaaatgaatcctcagaggactatttctgtgggtgtgtgtctgcttgtgtgtgtgtgtgtgtgtgtgtgtgtgcatgtgtgtgtcttgccccattccaattctccatccccatgctgaggaggctggaggattcagaatgcagaatcaggtgtatttttaaaaaatcattatgtctgtcctcaccaaaacactggctatttctatctttccttctcattttactctgctataggaatctaagtaaatcatctttaggaaataccaagacctaccaggggttttagattgatggcggccgacacaacctagtattgatagcccatgtaaatgtttgccatccagatgacaaggataacgacaaaactaacatgacctgccccatggtgtgctagacccacatctcttggggaatgttttgaagcaagttaatgcaagctacttgataaaaggcttctgtgatgaaatgagaatggggaagctgagttaaacaaaatcaaacagtgttctgtgttggaagcttctcaaatccttaaccatgctgaaaagcttagagtatttccaggagaatggcatggcaccccgcatcccagacctgcacagcccctgctcaggccatcttgtgggatgaacagtatgcaaaacacacattctggaacatgcttgaagagaggggaggccactctctagcttgggcacagttctggctctggcacacactgacaacgtgacaccgggtgacagtccctctgtaaactgcgcttcctcatatgcgagaggccatggaacgttggcctctcagacgttactggctctaacattattttgccaaaaataaaataattagggtggatgtgttacaggaaagtggtccagatccagaccccaagagagggttcttggatttcaccaagaaagaattcaggtcgagtccataaaatgaaagcaagtttatgaagaaagtaaaggaataaaagaatggctactccatagacagagcagccgtgagggctgctgcttacccatttttatggttatttcttgatgatatgctaaacgaggggtgtattattcatacctcccctttttagtccatatagggtaacttcctgatgttgccatggcatttgtaaactgtcatggcgctggtgggaaggtagtagtgaggatgactagaggtcactcttgttgtcatcttggctttggtggagtttcactggcttctgtgcaacctgttttatcagcaaggtctttatgacctgtatattgtgccgacctcctgtctcatcctgtgacttagaacgccttaagtgtctgggaatgcaacccagtgggtctcagcctcattttacccagcctttattcaagatggagttgttcttgttcaaatgtctctgacagatgtaataggtaacgctcagacactgacatcagaggcaatgcaaccttaacagaattggctgacatatatctctgggtataaataaagtctcagctttcccctgagacgtaatgatgagtgtccctaaagtttgcttcacccttccacgctaaactcgctccactgttccatcatctgctttaaagccacaaggacagccagttaggcctttgtcatcatcacttttaacttttgtttaacttttaacaaagattggcctttttaaaggctcagttatattaaaaaaaacaactgcctgccacttacgcagtccatggattttaaacaaagctggcaatgcaagtcaatgggaaaagaatagtctttttcaacacatggaattggaaaaactggatacctatatggataaaaatgaactttgatcccttactccatactctgcacaagcattaaattaagattaactgagatttgatctgaatgtaaaatctaaaattgtgaagcttttacaataaaacaaagctagacaaagactccttctacaaatacctggcactaaacattaaaaaatcataaattgtgctcatcaaaaatacatctgctcttcaagatagatgaaaaggcaattcactgactttgagaccaagtgtttctgttcagaatatgtaaaggaattctaaaactcaacataaaaagacaaaaataaaacaaaaacacatgcaaaaaataaaaaaagatagaaaataagcaaattatttggacaaaaggctcccaaaaaaggaaatgcaaatagctagcaatcacaggaaaagatgctcaatattattagttatcaaggaaataaaaagtaaaaccatgagatactcatacccattagaatggctacagttaaaacgactgacagtactaagttttgctgaggatgtggagcaattggaatgctcatgtattgaggtgagaatataaaatggtgcaaacacttttaataactaccctatggctcaacaattccacttatagatatataccaaagagatatgaaagcatatattcatccacacaaagacctgtacacagatattcattgtagcgttattcatgataacttcaatcggagcagaacccaaatgcttaccaaaggatgaatggataaacatactgttacatattcatataatgacataatactaacagataataaaaggaataactattgttacctgcaatggaaacacatataaatgtcagaaatagtacgttgttaaataggccagatacgaaagagaatatgttgcatgattccatttatataaagttctagaagagacaacgtgaaagtcatggtaataagaacagcagttgcctgaagttttgtggtttggcgatatgaggaaattttctggagtgatggaaatattctatatttttattcggatgatgttttcacaggtgaatatatttgtgtaaactcatcagaatatataaaaagattctacaactcaaaataaaattttaaaaaaccacaaaaagttattgtgatggttaatattgagtgtcaacttgattggattgaaaggatataagtattgctcctgggtgtgtctacaagggtattgtcaaaggagattaatatttgagtcagtggactgggagaggcagccccttcctcaatttgggtgtgcaccatctaatcagctgccagcgtggtaggataaaagcaggcagaggaacgtgagaggactagatgggcttagtcttctggcctacatctttctcccagctggatgcttcctgccctcgaaaatcagactccaagttcttcaactttgggactcggacctttgaacacagactgaagcctgcactgtcggcttccctagttttgaggctttgggacttggactgacttcctggatcctcagcttgcagatgacttattgtgggacctcaccttgtgatcatgtgagtcaatgctccttaacaaactcccctttatatatacatctatgctactacttctgtccatctagagaaccttgagtaatagagttatgcatttttattaaatgtaaattatgccttaattaaaaataaatatcttctcaacctccaaaaagagactttctgtctgaaacttgagaataagtctaaagttttcatttaataatgaatttgtaaaagacaggaaaattgattttggcattaatttgttcaacaaatatctgttgagcatgtcctatgtggcaggggctgagtgtggggtgtggattgggtgaatgtaaggaacatatagttcctggctccctagagctcatggtctaggggttggagagaattggtacattgggattttaaagggggtgccaaaagtggtgatgacaaagctcagggaagaacaactggagtggagggagggcatcaacatggatgctgaaccaagccaatgtactgctaagagtgaggtggaaagtatcatgtgaaccccagagcttcaattgtcaataagtattggggtgtgaccagcagattgatagaagacagcaaagagagaggggtgaatgccaatagagcagaatagcatgacttgtcaagagacaggacttttcaaggtgaaaggaagggagatggtcctgaagcagcagtcatgtctatgacccacctaagccctaagcaatgacagataggaacagagtcagggtcctcagaggacaacctagttttaattaaggacagaagttgagaagaatattttaagaaacatttgaggacatattacagtttgctggctatgggttagggtagggtggaagagagatatttggaataaagggtatggatgggacaagacaaagcagggcaccagccctaccttggacctttccttaacttgagacagccatgtccatgttgattcagccaatctgactcaggtattatgtaacttgaagttgaaccatcccaactgatataagtggtgatactgagtaacacaaatgtgctttctggattcacacatgtactttttttacatgaaaagttcaaacttctatgtggagaattttttcttttttttgtttctttttttgtttttttttttttgttgttgttttgtttttttttttgagatggaatctcgctctgtcgcccaggctggagtgcagtggtgcaatcttggctcactgcaagctctgcctcccggattcacgccattctcctgactcagcttcccgagtagctgggactataggcgcctgccaccacgcctggctaattttttgtatttttagtagagacagggtttcaccattttagccaggatggtctcgatctgctgacctcgtgatccgcccgcctcggcctcccaaagtgctgggattacacgtgtgagccactgcacccggccgatttttttcaacagtatcctcaagaagtattcatcattcaactctttctaggaaaggtatttaaaaaagaagaaaaatatcatttctggcctggaatgtcaagacatacatctcttagagatttagttctaataattattgtagagtcttgtggatgtttcttataattttaatttttacaaaaacaaatctgtccatccatgcatctacgtatgtatgtatatatgtatgtatctatctatcttcatcatcataattatgcatctaggatctatctattgtgtatctatctaataatctatctatgcagaactgcaacatttacatgactggcccataccgccctctgctccccactttttctaatcttcaaaatcaagtttctggactcagggctatgaaatgcaaagtgaaacagctcatgtccaatggtctgacactctgctgctcatgaaaacctgcaacatccaactgagtttttcatttttaacatcagcagatctagttctctatcttcatagagagttatttttaattttattaggggataaattcttttttaataaagaaattattaggtatcaaaataccacaatctctttttggatacaactagattatgtgtatgggtgaagtattttcaacttaagaataacattcctgttccttgaacactattttggaagtttgggttaagggatattaacttccttaagacaaaacagactcacagttgaaaactactcaccttctctatagaagttgcttaatatcaataatttttattgtattggaacaaaatagactataactttttataagatacatataggtttactactaaatattcttaaaatgaatataatgctataatattcttattttgaggtaatatatatatagtctgcaaaaattaggtttcctggtgtcattaaccacttatgcaattatttttctgaaatgaatacacatgctgtacgtgcagttttgcctgatacaagttttaaaacaacgtatattggaatcttggaactaaaaatgagaaaatcagtgtccccttgatgtcaatttcagttcaaactgcacttgctattttatttttaattggttacttacattatctgtacattgtcacagttgatggtatttgtttacttctctgtgaccataatttgcacagatttaaccataatacatccttaaagattacaagaaatcttttagacacagctcctctcagttgctgaggatccaacttttactcatttgttttcttcatgaatatgtatttcctgagttgtatgtttgtacatagctatttgtagcctttgaagtttatggaagtttgtttggttgcattcttggggcacattttctttccctgatgactgttaaggttaggatatttgacccttccaaagctcatgttgaaatttagtccccaatattggaggctgggcctaatacaaggtgtttgggtcatggggacagatcccccccattgaatagattaatgtcctctcctgatggtgaatgaattcttcctctattagttcctgcaagacctggttgttaaaagagcgggccacctccccggtttctctcttgcttcctcgctcatgtaatctctgcacatgctggcttccccttctcttctgccatgagtgggagcagactgtggccatcaccagacgaagatgcccaattttgaactttccagccaccagaatcataagccaaatcatccctttgcctttataaattatccagcctcgggtattctttatagcaacacaaaagggacaggactttttatatcttgccccactgtcttctagcatttcatgtgtcccataaagaaatcttagtctcctaggtttttttttttttctgaatatccacagaattctttccataacttcaaataccaggaatttattggggtatttgttaattattcaatataaacacagccttgtaattcttgggctatttctgtctgcagattcaaatttcactgtatttcaggaatttcaccttgaattgtatctttgaaaatttgttttcatgttccattcattttttaacccatgcaaggcatttagtgttaatgatatttgatctcttccctaccactccctcccatccccctctttttctctatctctgtcttccatcttttacttttcgttcttttccatctcacatgctcattttttcttctcaaaaccatccttcgaattccttcagtggtgtctcatctcccttttgctgcttctatcatgacctttgattttggtctctttttgtgtgtctctctctctctgagattctgaggctctgcctattccgtttttattctcatttgtttctaattgtttctaagactctgtatactcctttttcattctcatttattactaatttatttctgaggctttatccactcacttttcattcccatataacctaatgtattatcagttcttccttaaagccttatattgcttctttaaattctcatttcagagaaacaatattgtctttaattgattccttagaaataaccttgttcatggtttttggctgcgttgtggtatataatctttccgtttctcatcttcataaatcatgttctgttcttcttttttcatttcagcatcattataaggcccccggctggctccaccctttttaagtagcattgttcctcatctttttggactagaattttgggcaaagttctggggaaaggggaagaagaatgtgccaaacaagtgggaagattgggtttcagtctgttatctctaggatgtttctcagctggacttggcctgtgggttatctgttctagcatagcaggatatcttccaggctcacaaggaggctgtgcattttacagaacattttaatgtgattattttaccttgacttatcttcaccaggcagctttgggcaaagacggccaggtagcttttatcttattgactcttccttctatcctatgccatgattgaaacatgatgtaggcttccaaaaccaggccatgaaccttgatcttaactttctaagcatgggatagacacatttcctttcaatgtgtgccacccatccactttggataactatgagctgggtccactctgcctgagtcagacatagaaagataccttctcttggagttcccaaatacctccatccacttctcatacacttggctttcttcctgcatctactgtaatccagtgttataggggatctgtagcttcatccaagataacatttgtttgtttcttcttctcttgtttgctttggattggtttcataaaggaaatcagacaaaaatatatttatactaccatttgaaaagaaaagataaattccttctttcaaattcattcctttttgtttctttccagtgaatctcatggggtgaggggagcactgaagggaatgtccaatctactcaaatccaaaaagtcacaggtataaggcacagaaaattttaccagtctaatgatggcagttttaatgctatataaggacagagtatgcaaaaatgctattaatgaggatgaggagctgggagttcgcaaaatgttggcccagatgagtgcagcagacatttggcccaggtgagcctagcagatatttacatgaaatattagggagcatccatctgggctatgtgacttaggctggcgatacacgacagaggattccaatttgttgtataaatcaccctcagagcccccagcagtgaacacatagggggttcttttcattttcatgatgcttaatatagtctttaaaaataattaaaattaggtgaagtgtgtagatttctgagaaattacagaaagacattagttttgatacctcttgcttgtagcatttgaccaacataaacaaactaaaaggtttaaaaagaacagggattcttcccagtggtatagtgtaatgggtagggaaaaaaagttcaaaattgataaatagaccaatattattctcaaaactcataccactgtcattgggaagaaatgaatacatattacttagtcacttcatgttaccatatacttatattaacacaacaaaaaggaaattatacgaaaaaaagtcatacatttaaaggatggaagaaaatcctaggtttactcggagctcaagatcccattgagatgaatattgttctttcctcagattgttccttcatttcattcattcacttatgtatgcatttatttatttagagatggggtctatttctgtatttatttatttatttattgatggagtattgctctgatgcccaggctggagtatagtggcacaatcatagctcactgcagccttgaactcctgggctcaagtgatgctcctgcgtcagtctcctgagtagctgggactgtaggtgtttgccaccacgccccgctaatttttaagttttttttgtattgattgggtttccctatgtttcccatgctggcctttaacttttcagctcagcgatcttctgccctggcctcccaaagtgctgggattacaggtgtgtcccttcatttctaatgaaggaaggttttcctttgaatattcacaacagatatttttaaaagaaaggcagatttgaagcaaccatcaacaagctttacctgaaaattaatctgatatttacaattgcattatataaaagaaatgttacagactgaattgtgccacacctaccccaaaactcttatgttgaaatcctaacacccagtacctggaatgtgattgtatttggagatgggtcattaaggagtaaattaaagtaaaatgaggtcacatgggtgggccctaatccaataggactggtgtccttataagaagaggagatgaggacacagacacacacagatagatgaccctgtgaggatacagggagaagacaccatctacaagcccaggagagaggcctcaggaggcaccatccctgctgacaccttgatctcagacctctagcttctagaactgtaagaacaattgttgctgtttaagcattcccatatgtgggactttgttatggctgcctgagcagcctaatgggagtgcaaagactttctttaaataatgtataacaatgctggtttggaaatgactatccagtgttgagttcaaaactttatctttatggatgctgctatgagtgagtgtctaatttgggggcataatattgacattcttcgggagaaatgcagactccaatcagtgcagaaaatggcacagaataatgtttaaatatgccctccaggccataacatggttgggttaggaggaggaatattaaccattcccatcctaaaacacagaattttgggtttctttctgtgagttcaccacctctgaccttcacagttaagggaccatcacacagacatctgccattttcatataactgtctatccaaacaaaggctgaaaattcagcatggaggaactctcccagcacccgtggtcagccccttggcctgcatccccaccctgggcactggtgtgggggtgggattctttatgaacttgggccccaattctgcttcccctggaaagctggacccacacaacatcaccctcatatgcagaccctcatgtctgggcacctgtgcctacccggagctgggggtctgctctaggagctggttcaggacaggatactcccatccaatctgtgcccaccatagaaaagagccagccaagtgcctgctactacagggctcttcacacatggaaaagctgccctggggaagtgtcccaggaaagggcagggggacaaaaaaaggtcacagtgatttgcctccagacactggacactcttccctggagagtacagggcatgctcctctccaaacctgatcttgctacatttgtgctgcccacagtagtggtgccactgagttttcaaagaagacagcaggccctgaattgtgcaaggaaaataagtgcttgaattttgtagcatgcatgcagtgttctacttttaagaatggtaccaggctcctctgatattcaagaaaggcccccaacagctcagatggtagttttctaatcctgtcttcccacatgcacatttacctcctccacccaagaactgaataacagacatgagtgctcaggacgtcatgctgtctactgtcatccccttcctaagaccccctctccccatctcttgacacccctgttcttagctccctctttctttctggcctgttacactcaacctctccagcatcctaacaagtacccactcaaacctatttcctcccctgctgtgctgcttcttcaaaagtgctttgcttctcatcctcaccttctttccttgccctcttccctgcttccctcttcaaagcacttctcagctacaaatgagaaggaagggatctgattaaacaggctatgagcagagtcatgttctgaggagatttgcatttttaagaggagattaatgaccacatctgacaatgtgaccctggaatcttatgcagagtgataggggatttgggatgagctccgttcagggtaggaagcgagagtttggatctgaaatacttttcagatgctgaagtcataggagcttgcagttgcttcctgggcagagccataaacaaacatctcttctgcagagtgggggctgagaagatggaacagtgacccaggagctatggaattatctggccatgttacacttgcaggactacacacatttaagtgaaaaaacatgcttttcgtccgcctggctgacctcttagcctgctctcctcttattgttcccttgaaggcatcattttttgaaagagaaatttaaaccctgtccatctcatcttctttggaagaaagttaagattcctttctgaggtctttcatcatctggagtttaaaagcttcctctcctctatcaactctctttgaatccctcatgtcacaccaaacttcaaaagagacaaatacttttgcatgattccctgcaggctctgttttgccctgtagtgacagccccatgtcttcgctttcctgactggaaaaacttctcaagctttctacattcatgatctccacttcttcagtgcaaccttctccagtttgtctctgatctccaatggtccctgcattaatcttgtccgagccacaggtgaccctcgtatcatctcagcttctacttcccagtctctctctgttttttttttttttttttttgagacaggggtctcactctgttacctaggtttgtctcaaactgttgggctcaaaagatcctccgacctcatcttcctgagtagctggggtaggggtgtgagcccttctgcttggtctccagtctttgcttttcttttttgacctatacgtttggtggttgatgtccatgttcatgtaattgtcttctctggcttctcagggccaccatgcattcccttctccctcttttcatttattatcttttcatctagtaaaacccatcttcccctaaagatgtatattttcctcaaagcaaggattggcgtaccttcacaaactgagtctccaatgacaacacaaactgaaatgcaatataaatcatggacagatgtgagctcctcttctacttcctgtgtcctctgctggttcttctcaccaacatcacgtattgctaagtaagccagtgatgtcaagttagaaaatggactgagtccattaattcatttggcacgctccaaagtcctcacctgagatctatctactctccaaataattacacttcttagaaatacaggaagatccttttcacatgagctaattagggcgaatacatgtaagtgttggtaagaagtactagaaatactggaatttgtgagatttcattgaagaaccaacttccacccagcccttcacattgttctctttcggtagtttcttgtcatttcctccttttactatcaatagggctgctgtgaacatgcatgtacaagtttctgggtggacatatgttttcattttttgggggggagtagatatcaaagagtagaattgctgggttgtatgatgaatgtgtgttctaacttttcagaaactgggcttctactgcttcctaatttcaccttccacgccatttctgtagtgaggcccactccttggccttacaagacctgaattaagttaggtgccagagtcgttctgtcattgactctgttctttcccttgctagcctgtgtaataattggcagtcagacctttacataagcaagggtttcatatgtctccccagttatattacaagttccacaggggcagggctatgtctatctccttgacctctgaatctgcgatgcctggcagagggctgtggacaccggtcaccctccataaacactgggagacaaacaagggagtcagtagagttatttttttgcttttctacccccagaactgttagaatatgatttgagctattccttcaaggaagtcctggggcaggtgatcattcatagatgatgtgagggagtgcacagcacatgagtttgcaggaaaatgcaaaccccacgttgaaatttgatccccagtgttggagatggggatttacaagggggtgtttgggtcatgggggtggctccctcatgaatggcttggtgctgccctcatggtaatgagtgggttctctactcaatcctgcaagagctgattgttagaaagagcctggcaccttcctctcctctttctctttctcctgcttcttctctcaccatgtcatctgtgcacacaacagctccccttctcattccaccatgagtgcaagctccctgaggcctcaccagaagcagatgctggtgcaatgcttcttgtacagcctgcagagctgtgagccaaataaacctcctttctttataaattatccagcctcactcaggtattcctttatagcaatgcaaaactgactaagacagggtatcaggagacctagatttgcctgcatctgagaacgtcatcaggactcttggaacaatttagcccacagttccaaggttgatttttgtcacagcgaagttcaggtagtaagaattctcactggtggctgttgagggtggtggtggtggggatgggtcatatggagaattagcagtgggagactagaaattaaagtggagaaagggaagaattaaaagtcaaaaacagtgtgagggaggaaagcaatggatataacacctcggatctttatccttgagaggccttaaaaatctacttaataatcagatggtattctataagaactttgagactagacatgtgatgacttttaggaaactgccctggagctgaaaatgcatgcaaatctagctgactcagctccagccttaactggctcataacttgtttcataaacatgactgtatgttagcaaggaaatgagagagaataacagcacatcacataggcatgaaaagtatttgcaaagcagcagttctcaaaaatgacattttgcagagttttccagaagcagattcagaaaactgaagaccaaagtaatgagggagctgtctcatgcctagatgagcagaagcataccaaaggcttagtatttccccaagtaataggcacctgaaacttatttaaggaaaatactcttcttgatgaaacaggcactgcagttgaagcaggaatgtgtttggtgtgctgccttaaatagcatgggtagatgttcaaacatgttaggactcactggccctaggaaagacccgcaagtatctggtctacaccaggaaattgacaatgaaacaccaaacaccttttctcctctaattaccaagaaaagtatttctttcccaatggtggaagacaataatgttgggaatgatgaagttttctggagtgtgaagtggatatgtcttataagtttaatccacagcttcaccacttcataagtggataatcgaattgtgcctcagtttcctcagacttggggatattaagagtaccctcagtcaccacaaggtgggtaccaacataagaaaagggtatagcaaaagcccaggggtgcatgttcttaaagtgcctagtgtgggattagaatgacaagtggtagatgacttacttgtgcagaaatttagagttattttgtgattttcaaatgatcatgggtgctttccatatgctgtccagactgggggtgctgcagctagaaagggaagaaggtttccgtatttcctgagactggagtcacatcctctcaccaatgcactcacctgctgactaaccagtgtacttctgggaattgcaaatgcatgaaatggcacccattctagactagtcacagcagtgtttttgatggccacagaccaggaacgaccctgatgtttatccgtagggaactaggtaatgagccatgatcctcatcatggatactgtgcagctgtggcaaagaatgaggtatccttctgtctgtgcaccgggaaaggtttccaagatacactgcacagtgagaaaaacaagaagcagaacaatgcacggtgtgctacctcttgcattacaaaggaggaaatgtaaaactaatttacaaatggccaataagcacatgaaacgatgctcaacatcactaatcattaggaaaataaaaatcacaactacagtgggataccaccttacatccattatgatggttgttctcaaaaaaaaaaaaaaaaagaaaaacagaaaagaaaaatgttgacaaggaggagttggaacgcttgtgtagtgtttgtgggtatgtaatatggcgcacccactgtcatcgtttctcaaaaaattaatcatagacttaccacaaaatgcagcaattcagcttttggtgtattccaaaaagaatggaaagcagggaccccagcagatatttgcctgtgtttgttcatagcagcattatttataatagctaaaagttggaaacaagcccagtgtccatccatcgtgaatgaataaacaaaatgtggtctatacgtgcaaatgaatgggattcagctgtaacaagaagggtggttctgacgcgtgcttcaacatgatcaagccttgagttctttctgctaagtgaaataatcagactcagaaagacaaatattacatgattccacttgacagaggtgcctaacgtcatgaaatgcatagacggaaaatgaacaggtggttgtcagtggctggagggagggggaaagaggagttggcgtttaatgggtatagaattccagttcgggaatatgaaaaagttctgggtggggatggacagtggtggtggttgaacaacaacctaaatgtacttcctgccattggatgtacacttaaaagtggttaaaatgggccgggcgaggtggcttacatctaatcccagcactttgggaggtcgaggtgggcagatcacaaggtcaggagatcgagaccatcctggataacaagatgaaatccactctctactaaaaatacaaaaaattagctgggtgtggtcgcatgcacctgtagtcccagctactcaggaggctgaagcaagagaagcggttgaacccgggaggtgaaggttgcagtgagctgagatcacggcattgcattccagcctgggtgacagaatgagaccccttctcaaaaaaaaataataataaaaaaaagaaaaaagaaaagaaaaattggttaaaatggtgaattatatgttatatatattttatcagaatttacaataattcctattgttttgcataaaacagctgtagaaagctttgcaggtcatgaacagcacagctggccactggggctggtgtggggctaggacctggttgcacagggaacagggatgagacacaggctcttcatgcctgcacatatatacggatacacacagatgcaaatttctaagccatctaaatacaacacctattcaaaaaatcaaacagaaaaaggaaatgttatggaggtgaaggatgagggtaggtggggtggctgctcaggacagtggaggccacatcacgcaaccttcgaggcctctcttagctgctggagcacatcccagggacttgggagctctggaaagaggagcaggagagggccatggccggaggaggcctgaaaaagatcatctctgccacagagaagaagctggctcagatgcttgtggccactgtggagacagggagacccagggagacaacagtattcactcaaggaggaatgggtggtgatgcaaacttgggtggaggccacagggtgcagaagacaggacacagcagagagtgatgtaggacatggaagggacagaaaggagtgaccaccggacataaaggggcaaggaaagtggaagcatgagaacatctgctgggcatctggtggagggatcaggttcccagggtgcccatccctaagggagaacccaggataggagcagattcagagaaaaccacccagctcactccagcaagaagcagaaaagggactggttaaaggacagggtaggaaggtcaccaagctccaagggccctcatgaatccagcttgtaggccacagggcccagggcaaggaccaaaccacaggcacaggacagctccggccaagatcttctggctactgcaggaggcagaaaccacaccctacaccctgcactgctgaggctagccctggagtccagaagcttctgcaccagaacctttggtcccccatccccctcaaaaaattaaaaacaaaaagcaaatcggtgccatgcacactctgtttcctggtgctgttctggatcctgagtctttcatgggagcacctgatggggaaagcctggacctgtgttggtgtccctcctgcaaggagtgctgggacaatgaaatttctggcttcctccttgggaaggcagaacattccccatgtgtactggtggcatttaaaaactgcagggcagccagagaacatgcaccgtgttccaccaggagagtttctggcgggttgtcccggtgcagacacccgtcccaaggtgggtatttgagctgaggaactgagaagccggtttctgcctagagttagagatccgaaaggcatcaccacatggaagggaggaaagctacgatgccttgagggtgggagatcagatgaaccaggagaggcagggcccgggaggaaccccggggagcagccgcctttaaagcctgggggaagtagcttcagagaaggtggggtaggtttgtgtggggggtgctggaaaaatataattaagaaagaaatttctgctcagtccagaaacccctgtcacatccgtagaagtaaaagaaacctgtgttatgattgagtaaccattaagccaaaatgtgatgcaatctgctaagagatgacaaagacagaaagaaatcccacctttgtatccagccaagcaggtgcaacccgttacacatatggtctccagatagatggtgactagttcccagttgagaggactcaatggccccatttgtcacacatagttcatcctaaattcacccagtaactgtgttggttctctgtgaggttaattggctttatccacaggaaaaacaaacctctcttatctatgacaggaggtagttttgcaactgggaatgagatgcccccagaactgaggttccttccttctcacagaaactgggagacaggggcgctttctggccagatgcctgcctttcaaagagatggctcctatggccttgaggaggatagttctgggttgtgaggcaggcaagatgcttatgtatgtttagaaagctttacatacatcttcaagggacagagaaagaattttcaattacacctcttctaaaaaaaaaaatgctctcaaagtccagcctaggcaacatagcaagatcttatctccacacacacaataataataataaatttgctgggcatagtggggtgtgcatgtagtcccagctactcaggaggctaaggagggaggatcacctgagcccaggaagttaaggctgcagtaagcttggatggcaccactgcactccagcctgggtgacagggatggcaccactgccctccagcctgggtgacagagggaggctctgtcaataaatgaatgaatgaatagaaaatgctctgagtgaaaagaggagagtctctttatctttttgcaacaggctaaacaaaatttttagaatgtatatttgcctcacagagattattccaggaaaagaagtggccctcagtgtcaaaggatgcaaaactaacctgtgagttcctggcaggtttagcaataaagcaggatgtttctgatctcagtacaagcaatgttagagaaaggggaggatggaagtggacgtggaccagtgagtggaaggtgacaaatggaagcaaaggaacgtatccagaccattgaagatgcttgaccgagaggaaaggggcggtggagggaacggaagcccgaggaagtcatttgttgcaataagaggcctcagagcacgtgtagggtgcggggcagagcccatgcagaggggctgtggaaggctggcagggtgcaggtggccccactctctgtcaccctgaggagtatgtggtcagagttaaagctcagtctgtttctgggatcaggtaagaggtcagcgtccggagaagggaggtggatcttcagatcctgcagacctccaccgcgccctctgtccctcttgactgctttttctccatctctattgtctggctcacattcctgtcacgtcttcctttctccctacccctcttttctcttttctcctctctttttcttaacccttgtacctttggaagtcccactaatagaatttaaacagcttttcaagttggttttttgttcccagaaattgacattagactctccatgaataatgtagaaatcaagagtataagctggttcatgtctctgcaaataaacaaataaaatctacattccaatgctttcttcttccagagtagcccacatttgatatttgtttttaattactgtcacttgcgatagatttttaaatcttgtaacctggttacacaaataccatggggcaaaagccttacttcctgtgagaggaaaccaggcttgactagcctcatgctggctttgaagaagtaaaatcaggggttgatgaatttgcatagggtaaatatcaaaggtcgaaagtcaacaataggtgatagagggaataccccaaattacaaaagaacaaactgtttaagccacaacagaattatcgtagaaataaaccacggtccttcctgctaaaatattccacttagaattgtaaaatattcttctcaataactcctggaagagcctattaagaaattagtgaggctgggtgcggtggctcacacctctaattccagcactttgggaggcctagacgggcagatcacctgaggttaggagtttcagagcagcctggccaatatggtgaaacactgtctctactaaaaatacaaaaattacccaggcatggtggcaggcgcctgtaatcccagctattcggtaggctgagggaggagaatcgcttgaacccaggaggtggagattgcagtgagccaagatggcgccactgcactccattctggacgacagagtgaaactccgtctcaaccaaaaaaaaaaaaaaaaaaaaaataagaaatcaacgaatgtaagagcatctatgttccaaatgcagtgtattattttatgcaggttttcacaagctccaaaagattcactgtgcagaactggaggttctagagaaagaccacgcctcctcctgcaggtaactcttcattcaggaagcagctcttggcttatccctgggcttagtggaattcgaatacctgaccataggacaccaagggctttgggacctgagtggcacatcatgtcctggtgacatctgagttacctggggcgtgcacagcagcctccagcatcccagggagagctgtgtacggggtcaggctcaagcgggtcccagggcaccagtgacccaatgggtgactcagactcccatggcacctgctccttctgtttctccctccgccgtatatatgagctcatgggaagtgctgtgacctcttacagaggaggaaagtgcatggacttccagcttctagaactgggatacaataaactcctcttgcttgtctattcctctgcagtattttgtcatggcagccctagcaaactactacagggactgtgggggttaggatgacaccaagcatcaaatgccactccctgttccaacactgagaccattccacagcccctgaatgacaagacaggccttcaagctcaagactacttggctaggtaagtactttagtcacaccacttctgaactttcttgcctacctgcagggcaggaatttttaccattttcaaatgaggacactgaagctcagagaagtgatgctatttcctgatggataagaggtgatatatttcagtcctcagaccaactctgaagtagcaagcttctagtcttaagagtcaaacttggctgggcatggtggctgaagcccataatcccagcactttgggaggccgaggtgggtggatcacctgaggtcaggagttagagaccagcctggccaacatagtgaaaccccgtctctactaaaaatacaaaaattagccgggcgtggtggtgtgtgcctgtaatcccagctactcaggaggctgaggcaggagaatggcttgaacccgggaggtagaagttgcagtgagccaagattgtgccatttcactccagcctggggaacaagagtgagacatcatctcaaaaacaaaacaaaacaaaaaagagtcaacctcgagccaggcacggtggctcatgcctgtaatctcagcactttgggaagccgatgaagtcaggagttcgagaccagcctgggcaacatgctaataccctgtctctaccaaaaatttaaaaattagctgtgtatggtggctcatgcctgtaatcccagctatttgggaggcggaggcacaaggatggtgtgaactcaagaggtggagcttgcagttagccaagattgcaccattgcactccagtctggagtgccaaaaaaaaaaatccatctcaaaaaaaaaaacacaaaaagaataaatatggggcctcatgactgtatattactgggcttctgacctagactgaaagatcagggaagagtttcctgaagagaaagtgagctatgatgggcccactgtactccagcctgggcaacataatgaggctctgcctcaagaaaaacatgcagaataaaaccacaaaaagataccactacagaactattagaatggctaagattaaaaagaatgaccacgccaagttttggcaaggatgtggaggcactggaatgctcacgctgctggtgggaatgtaagatggtacaatatctatggaaagcagtctggcagcttctaaaaatttcagcatacacccaccatgccactcggcaattccattccattcccacattatttttatttaaaggaaaatcaagtggaatgatctttaaagcatttttgcctgacaaatacatgaaatgtgggtagcagcccaacactccctggtcagtcttcacagggcatatgtggcctcgtggcccccaggaaatatggctctttccacaagtgctaagtccagtctctccatcaatcctaagatgttagttccacagcactgccagcatggggctttgtctatttctttctttctttgtcttttttgagaggggtcttgctctgtcatccaggctgaagtgcagtgatgcaatgttcgttgtaatagctcccatttcatttctaattgatcttatttggctcttctctcttcttttcttggttaatcttgccaatggtttatcaactttatttattattcccaaaaatcagctttacattttatttatattttgtattattttgtttcaatttcatttagttctactctgatgttggttattttctttcttctgctgggtttgggtttggtgcattcttgtttcttgagtttctagaaatgtaaccttagattgtctatttgtgctctttcagtctttttgatgtaggcatttaatgctataaacttttagcacactctttgctgtattccagatgttttgatagggtgcgtcactattgttcagttcgaagaatttttaaacttccatcttgatttcatatttgacccaatgatcattcaggagcaagttatttaatttccatgtgtttgcatggttttgaaagttccttttggagttgatttccagttttattctaccgttgtctgagagagtacttcatataatttcaattttcttaaatttattgagacttgttttgtggcctatcatatggcctatcttgaagaaagttccatgtgctgatgaatagaatgtatattttgtggttgttgggtagaatagtctgtaaatatctcaagtctattttctctaggacatagtttaaacccattgtttcttccttgactttctgtcttgatgaccagtctagtgctgtcagtggagtactgaagtccctcacaattattgtgttactgtctatctcatttcttaggtctagtagtaatagctatataaatttgggagctccagtgttaggtgcatatatatttaggattgtgatattttcctgttggataaatccttttattataatattttattattatataatgtccctctttgtcttttttaactgctgttgctttaaagttagtttttttgatataagaatagttactcctgctcacttttgtggccatttgcatggggtgtctttttcttaccctttaaccctttaaagtgtttatgtgacactttagggttaggggagtctcttgagggcagcagatacttgcttggtgaattattatcaattctgcaattctatatcttttaagtggagcatttagaccacttacattcaatgttagtattgagatgtgaggtactgttccattcatcctgctatttgttgcctaaataccttggttttattcatttatttattgtatttttgttttataggtcctgtgagattcatgctcaaagaggttctgttttgatgtgtttccaggatttgtttcaagatttgggttccttttagcagttattgtagtgctggcttggtagtggcaaattctctgagcatttgtttgtctgaaaaagactgttatctttcctttatttatgaactttagttttgctggatacaaaattcttggctgataatttttttttttttctgagatggagtcttgctttgtcacccaggctggagtgcagtggtgcgatctcggctcactgcaacctccacctcctggattcacaccattctcctacctcagcctcaccagtagctgggactacatgcgcctgctaccaggcccggctaatttttttttgtatttttagtagagacggggtttcaccttgttagccagcatggtctcgatctcctgaccttgtgatccacccgccttggcctcctaaagtgctgggactacaggcgtgagccactgcacccggcctgataatttttttttaaggaggctgcagatgggtatgcatgctcattggaggtgagcattcttcccttattgaagattactaaaatcacatgtattgaaaagcatttgggattatttacttaattgatgagtactcatttatttttacatttatttgataccacgtataaaaaagtatggacatatacatatgtgatatgcgatacaccatagaacatatacatgtgcacataaagatagagggagacagaaatacttcagattttttcttttaaaactttttgcatgaacccataaaactcactgttaaaaaaaacagctggatttaaattgtgcttttgcaaaaagcaaaagttaacatttaattgaggaagcccttgctgagttttagagaaagtaggtagtaaatttacatctcaaagcacacacacacacacacacacacacacacacacagagagagatagagagagagagagaaggaatttgggtgtgttcaaggaagattaaaagtagttgccaaggtaacacaaaaatgatagaaatttataacaggattttataaggagaccaattttatttacatatatagcttttattttggtctctgttttccaactgtactccaggaaacacactacacaggctcccttcttaagtgctggtgggccactgcacatgcagacagcccactttaagggaagaatcaggggagaagagatgcagaccccagaattatgccaacatacaaaagcctaagtcaaaggtcaaaccacacacttgaaatctcatcgcctgtttggccctgttttaagtgtactttactttctttaatttctgctctaaagcttttaaataaactttcactcttgctctaaaatttgcctgtctcttcttctgctttatgacacttagttgaattctttcttctgaagaagcaagaattgaggctgcagcaggcttgtacagatttgctgccattaatatagtttagtgccattctacatgatagaatatatatattcttatatttatatatatatatatatataaaatttatgtattcatagaggccttgaatctacattcttgctgcactttatgtaaacaatccaggtataagactaaaacttattttggaaatacattggtcccatatgatttctatttcataaaaatgggagacaggagggggaaaattatttttcagaagaaaacaacagaacaatggttattgaattttagatctgttcatttttttttaaattttgttatttacctacaatttggactgaatcctaaattttttcctggctcaaatttcaaaactaatggtttcagaattttcttccatttttcttccattttggtatattataaattaaaactgtgatttttaaatttttatcttttttattacacttttaagttctgggatacatgtgcagaatgtgcaggtttgttacataggtgtacatgtgccatggtgttttgctgaacccattaacccatcatctaccttaggtatttctcctaatgctatctcttccctagtcccccacccctcaacaggccccagtgtgtgatgttcccctccctgtgtccatgtgttctcattgttcaactcccacttatgagtgagaacatgcagtgtttggttttctgttcctgtgttagtttgctgagaatggtgtttccagcttcatccatgtccctgcaaaggatatgaactcatccttttttatggctgcattgaattccatggtgtatatgtaccacattttctttatccagtctatcattaataggcatttgtgttggttccaagtctttgctattgtgaatagtgctgcaataaacatatgtgtgcatgtgtctttatggtagaatgttctataatcctttgggtatatacccagtaatgggattactgggtcaaatgatatttcttgttctggatccttgaggaatcgccacactgtctttcacaatggttaaactaatttacattcccaccaacagtgtaaaagcgttcctatttctccacatcctctctggcatctgttgtttcctgaccttttaatggtcaccattctaactggcatgagatggtatctcattgtggttttgatttgcatttctctaatgaccagtgatgatgagctttttttcgtatgtttgttggtcacataaatttcttattttgagaagtgtctgttcatgtgctttgcccactttttgatgggcttgtttgttttttttttcttgtaaatttgtttaagtttcttgtagattctggatattagccttttgtcagatggatagattaaaccttgcaagctgaaacttgacgacttatgtaaacttctggagaaatcatagcaacttatatataaacaacctttgtgcctgctgatgtgtggactacacaaaaggtacacatgaacactgtattcagactgcaattcagaaaaatgtgtcagattgccattgcaattggaagacacttcagaaactctagaaaacctagtctatacagttagagcgatgtttgccaaatgaattcctctaattgaagcagcagttgtgtgactttaataaggttccaggattatactgtcccttttttgctgtgacttccctttgcccttttctgaattgtcttcatccccttttccacggggcatgacttcttaagaatgagccttcctagtgatgtaggatcagatggaacatacagtcacaaagtcatgtcttctacaatgatttctctgaaagcttttgaggaattgaggggccaggtgtgctggcagaggcctgtaatcccagcactttgagagtccaaggcaggaggatcacttgaaaccaggagtttaagaccagcctgagcaacaaagggagaccatgtctctacaaaacataaaataaatcaaattagccaggtgcagcggtgcctgcctctagtctcagatacttgggaggctaaggctggaggaccgcttcagcccaggagttcaagactgtagtgagtacactccagtctgggtgacagagcaaggttttttctctaaaagaaaaaaaaaaaaggaaaggaaaagaatagggtaaacaggaaagccaaagatcttgggcatctccagatgtttgcctgaacaaattgttttttcttggcttcaaaacctttcaagatgcatatttctttgtaaaagaaggacatacgaatcgtaactttaagtgagcaatcaaaatctaggtcctaaaactgaagtattttaactctcattctgataatatttattttctgaggcaaagaagaaagacaagattagatcaattgtttctctgcccactccatctcttccaacttgccttgtcccctttaatcaaatgtataaatactaagcctcctgaaacgtcttcagagaaaacacaagccacagaggttttttgcaactcatgtattcccagggtgcactgtcaagctctggctcaataaaactcaattggtcaagacccttgcctcagtcagtcattctggataaccaccatgagtcctgcaaagcccttcagtaatctattgcctgcctaggtgatgtgtacctaggtgagtcagatcttcatgagtccaacactcgtcttccttttctgtctttcccaaccctaccactcagtgctgtgtgctctgatctgaccccagctcccaggttgtttgtattggtctaagaaagcaagaccaggaggggcaggttgagaaggaagtaagaggccaactgccatggaaagtggcaggtggggctgtcattgctcaaagccacacactctgggtgcattttatgaatttttctggattcataatcttctccctctgtgtctatctagaaactcaccctcctcctactttcttctcattactctttctgtttctagtgcactcatttatggccagagaatggccatgcaaatagttgacaatagaataaaaaatgacattttgtgagacttggaagctggcctttcttttttctaaaagagattgaggtttctaaaagctagcttttatggagggctgtgcagttatgattgtagttttacagaacaggtgcataagtgaagggtgagacagaaaacaaaatgctggctgtttgtcaaatcctgaaagtgaatgggacaaaaatcatgtttgaaggaggatgtcattcaggagaccttgtacatcttagagtgtcctcttaccagatgaagtggaggatgaggttgaattgtggggttaggtgacagtgggtacatacttctctgcctcagtttttgttttttttaatctgtaaaaatggggattgtggcacttgggatcttttggtgaggagtgtagttacctggaaagctcttaggatagtgcctggtacatagtgattcctgcatcagtgtgagctattataattatgggaatagaaaaaggtgccaccctggacatccagagtggggagatgttttccagtcagggtccaggcaggccagctggagacgaagctgattagtggggaagcttaacttccaggagtggaagaatttaggaggagtaaacagaatgcacaacatactgtaaacattcctttacccaacagtaggaatactcagagtgggtgtgtcttccgtggcaatcattatctcctgggaatctaagaatgtgtcctagagtcaaatggctttgatgtaagccaaacccagaaatgggcttcagggctgccttgcacatagcattcattcatcttgaaaaaggaaagcattcatcttgctaaaggaatcccctcttctggcccagaccattatttttgtttttttactatcctaattttaagatgtaaggagaaagactgaagaacaaaataatgaagtacatgaatgaaataacagggtagaattgagactggtatgtgtaagttaagagaaattgtgtataaattttgtgtgaacagaaaattgatttcttgttgcaaacagacctctctacataaataatacctcctgccttgagtggatagcagacctcatcacaagaacattccagcagagtcatgagagaatgggtagtgtggcttctttaattggcaggttagactgagtaagttactgaagagaaagaagttgaaggagaagatgggtgagggcaagaaaaatgggaaggtgaaaggaaaggactgaaaggaatgtttaccaagggctcatcaggtaccaggctctgtgactaatgtcttacacatgttaatttactcttccactgtcattttctgatgcggtaagagtcagtcttacactacaggtgaggaaagaggctgagggaggtcaaatgagtggcccagggtcatccagccacttcatagcagagctagtgtgtttcactgtggtttgtgcagacagaaaagtgagacatggaaggaaggcaaaacatttttgttgtgggtgatgtttatgaaagtgacccatatgaggcagaataatggcctcttaaaaatgtccacatccgggccgggtgcaggggctctcacctgtaatcccagcctttggaaggctgatacgggtggatcatgaggtcaggggttcgaaaccagcctggccaacatggtgaaaccccatttctactaaaaatgcaaaaattggctgggcgtggtggcacatgcctctaatgccagctacttgggaggctgaggcaggaaagtcatttgaacctgcaagggggagattgcagtgagcccagattgtgccactgcactccagctggggcaacatgagggaaactctgtctcaaaaaaaaaaaaatccacattctaactcttggaacacatgcatttacttttcttggcaaaaacactgtacaaaggtgatgaagttgagtatcttgagatggaaagcttattctggcttatctatgtggctcccagtgtcatcataagagtccttgtaagtgaaagggaaaggcaggaggggccgggtgagaatgatgaggcctgagagactccactggccgttgcttgctgtgaacatgtgtgataagacaaaattacaactaatttagttatagatgtaattggcttttatttgtgatttatgatttggggcagctctccctctacagatgcctcagcatcccaagtagctgggactatattgcaggatctgaccagaagcctgcaatgcaatggggctctttctttgttcccaggcagatcggcaggttgagaaataaaaggcacacacaagatagtgaaagccatatcgagaggggtcaccgccttctggtcctgcaatgctgccaatgcactggatataccagcatttattattaagtttagtgagagtggggataggttactgagggatttagggttatttataggctctccacaagggtcacattccattcccagagctatggacatctgcttttctgggataggaatcttggtaatgtgaaacctccctgactgcatgtccgttcataggctctctgcaggggtaagcacatcatgtgctgttagctcattctggcagcccaacctggcatttgtctttacacaatcctgcatgcagtttcatatttacaataatgaggagcatttcatcttttattccgtagcaatagtttcagggggtctccctacatctcccccttttctctgatttcaatgaaccatagcaatcatagcttggcactgatcacgattggattgaagaatattttttccaattttacacatgaacaataaaccaatagcacaaactgtctaaaacttcagcactgggtaaaacagttaagagtgcttgagaagcttcaaaaatctgttcttttagcttccttatgtctaaacttaaattatcttcacttccttgtaaatggcattttacgattcccaattgtgaacagactcattatattggaatggagttatacaaaaatcagaagtattccaatcacgttgcatttgtaatctatgttctaatctcataattctatctcccatccatataacagaagcacatcacgcgctgtaggctcattctggcagcccaacctggcattgtctttacacaatcctgcatgcaattttgtatttatcataatcaggagcatttcatcatttattctatagcaatagtttcggtgggtctccctacaggactacaggtgtgcaccaccatgcccaggtaatttttgtattttaactagagacagggattcaccatattgaccaggctgatcttgagctcctgaccttgtgatccacctgccttggcttcccaaagtgctgggattacagatgtgagccactgtgcctcgcccataaatcacacatttctttgagtttttgtaattccagcacaagagaaaccatttgatgtttgaagaatggctgcacacaaataaaaacatctgtggattgcgccacacgagggagactaccagtatgactatcaggaggaaaatatcgagtttggtatatacaccttaggcaagatgcaaaccaactacaataggatagatcaaagaagaagccagaagggtctagtcattttaaccaggcagcacatttaatgatttttacaactgactgtgtaatacccaatgtatttatccatatgcaataagaagtgtcagaaactgcacaggctccccccgttcagctgatagagagcaattctattatctagcattgcatgtctatgttaaattaaaacagggagtgagaataggcaagtatagaagtggaagcctaaaaaaatctccatacatttgaggaaaaagttgtgttacagatgcagctaatgtcagcctttgggtggattaaaggatctcttggtatgtaaaaatgtgtgggctgggtgtggtggctcacgcctgtaatcccagcactttgggaggctgaggcatgcggatcacctgaggttgggagttcaagaccagcctgaccaacatggagaaaccctgtctctactgaaaatacaaaattagctgggcttggtggcacatgcctgtaatcccagctactggggaggctgaagcaggagaatcacttgaacccaggaggcggaggttgctgtgagccaagattgtgccattgcagtccagcatgggcaacaagagtgaaactccatcttataaaaaaaaaaaaagtgtggttgacatgatatatctgacactgttaacttactctcagaagctacttcttgtgaaatcctaagtacagcattattctgggaagcaaaggagacaggcataagcaaggagaaattcagagaggtaagagtctcatcatgattgatagtcttgttctgacatcttgagaaaagctgtccacagtgtaaagtcatcaacttgttgtcgtggtttgcagtttgagtgtctctaagttatggtgttggacatttggtgagctcttagtggcccacacctcagacatgagggttttcccatgaaatttacattgagttgtccacctccaacttatatggcttcaggaacagagccactcttgttcttaatgatttcattggagaaaattgaattggaagaactaaaagaattcagggtccagtccagtctaccagtggattataaatactcaatgataatgaacagtggttcaatctggtaacaggtgtactacagtttttcttttcaacatagtttttctgtctataggagtctctatttttaccaaagataattccagtaggatgaatttgtttgcaaaataggttgagtctcaccgaacttgcccagattttttagctaagtgcggcaagagtagcaagggaccatagaggctctttttaaacttctctttgctagaagtttttaataagaatctcagattaaacttccaaaaacctcttgagactaggaagccaacccaaggcccgcttcagactttgcctgcattccctatgggtttattctatgtatattctcaaatataacatcccagtcaaagccttggtaatataaccaatgttttcaaatgtgtcctgttataaagagagcagattcttactaaacttgtgcaaataactttattaccataaacatatgaatattcatgaatagattcccaattctggggcactcagagagcaaaagcaaatgtttcaatttttgtttacaaaagtatactttaccaattgctgaagaaaaaaattcataaatctggaggataaaacattcaaaaaatcagcacattttccaataaaaaattatgaaaacattatccttttgttatttagtccaatgaaatggagttcttttcttctttgtcttgaatttcatgaaggtatcagcctgttcatcaaaattttgaaagttcttagtccagtggtatgatcttgaagttatcaggaacttgtattcaagagtccttttcatagtcttttccataaatctccttgaagaaaaagcaattttggactgtagctgattttaaatactttgaggaagaatcaaagcaactttctgggaatgacaaagatttaaaatgactatgtttaaaaatctaatgagaatttattatggtaaagacacagctcacatagaaatctagttacttctgtggcttatgacactatggtaacatatttgatttccagaaatttcatataatttttagaacactcatttttttaaattttttttgagatggagtctcactctgtcatccagactggagtgcagtggtgcaatctcagttcactgcaagctctgcctcccgggttcatgccattcttctgcctcagcctcctgagtagctgggactacaggtgcctgccaccacacccagctaattttgtttttgcgtttttggtagagatggggtttcactgtgttagccaggaaggtctggatctcctgaccttatgatccacccacctcagtctcccaaagtgctgggattacaggcatgagccatcgcacccagcctagaatactcatattattaacattcccataaatattatttagagaaggtttagcatcacttatcccttatttgaaaatgctttctatataatgtaatatataaaataaggtggcttttccattcagcttctgtttctcaagaggattactgagttcttggtgtagcccattcataaatagggccaaaaaggtatagtcttatgtatgttgaaaaagatccttaggtaattccagtacttctagctgaaaatcattcatttagttttaagttctacctattgcaacaagagttctccatccttgttacatgttagtagtgtcagggaagacttaaaaattaccaatgcctgggtccgtctccagacctttaaactggaactaatgggtggggcttgagcatcctcttttaaaaatgttttccagtgattccaatgtgtagctctatttcccatcagatttctctgatttcttgtggcattcaattttttctattttggtatcatgattattttcaggtctcatttcctgtcttaggctttgtgtctcctggggtggggcccttgccttcttcatttctgtatgttttttgaacacatgaactgatcatcaggaaaagatctcaaccacacataggttgtgtcctgagtctcaggttcacatgttaatcctaaagtctttgttctccacgaggtcagatgttgcttgtgatgaagggtgtggttaagtctgcagtgcagatggtggaagggatttcactctgtttttagacatagcattggaactaagaattttatgtctatatgggtgaaggggcagggatgtgtaggaagacagttctaattaggatggaggaattatactaggaagtagaggtaaaggaagtgagaaggcttagtaaatagaagaaatgtgaacttatcaaataggctagtgtatacccctggagattcttgattaagtgaattaactagattttagaaaggtaatgaggcagttatatgcaaggaacatttcaaagtctggagacaagaagtcaagcaatactttgagaagtggttgagctttatgggaatggagagaattacactattgagatatgttaaaaataatgaagaaggtttcaccatgtgaaattgtgtttctcatttgaatctgagaaacaaatgagcagaggctggagataattatgtctaaaagacagtggggtacagggagcataaaggccagggagaaagggaactgcaggaattagtgctgagaagcaggagttagtggatgaaggaggagatccaggcccagatacaggcaaataagtcatttccctctcccaagcatggcagtcagccctgcaggaaccaggataagagaaaaggtcatcatacctgccagtcttcctgaaatacaaaaatgacatcacggctgctacgttggattattgaaagcaaaagttcctaatcctggaggagctgtcatggaaagaaaagaaaagaaggaatgaaggtgatgttattttacatgggggagcgtcaggaacaagcatgtaacatgagatactgtataattgtttcttcaaggactacattatttctgttggaaaattgatgggagatgattatattcttgcagttttttttccctctcaccatgtttctcagttggtgatcagtcctctgtcaattctctactgcactcaggtattttggaaggctttcagacgtgagaaaggctgattgctattttctatgtcattggaacttgtcacctttgcaccttttcatggttgcatctttttctcagtgtctctgttgtggcagtcatgaatgagactctgtcagatctccatggcagggacctgattgacagaaggcccaggtcagtgcatttcaaattcaccacctcctttgcacagaaagcttctttcctacaggctcccaggaagggtgtgaaagcaagcctagttctctgaggctctctttaacgctaatgggtgactggttggaggattcctcatcagccttgcaaaaactcttagaattgcattggtacctaaaacttctttctctttctttttcacaggaatcagctctgcatagtggtctgtgggttctcctgtactaccttcatgcctgccccacattccctcacaggtgtcttccgtgataaattatcgtttaggtctaatcccgtcttggatgcatctcagttggtaaaaactaacataccaggcttgattctttgcagttagctctttatctttctctcccacaagtagtcagtagccttgttctagtgttttatgtgttacctctttttccatatatatatatatatatatatatggaaaaaggaaggtactgttgaggggcacttcctatgtgccaggccctgtgctaaatactttacctgtatctcatttaatccacacaataaccctgtgaggtagacattatttccattttgccaatgaaaagacagaagcttagcgtgctgtaaaaactttcctggtgtcatatggctagtgacaggtggatctgagatttgattctaggactatttgacctcaaggttaatgatgatgatagtaatatagtagctgacattggttcctctgtatgtggcatcttgtttcattgactgcatgaaacctttaaaagaatggtacgaagaaaacactctcattgcaattttcaggtgaggaatcagaggttcagagaagttgagtcttgtgcaagaaatttataactgtaaactcttacattaaaaaagaagaaagatctcaggtcaacaacctactttaacacttcaggatatgaaagaagaacaaactaaacccaagcacagtgaatgagggaaataataaggattagagttgatataaataaaatggagaatggaaaaagaatagagaaattaatgaaaccaaaagttgattcttcaaaataaaatcaacaaaattgacaaccattaactagattgactaagaaaaaaagagaaaagtttaaaattactcaaatcagaaatgaaaatggactctgagcatggtgggtcatgttttaatcctagcactttgggaggtcacagcagaaggatttcttgagaccaggtgttttgaccagcataggtaacctggggagatactgtctctacaaaaaaattaaaaagccaactagctgcgcatggtgacatgcacctgtagtcctagcatcttgggaggctgaagaaggagaattgcttgagcccaggaggttgaggctgcagtgagccataatcacaccactgtattccatcctgggctggcctacagagtgagagtctgtctctctctcttaaaaaaaaaaaaagaaagaaaaatgaagcgattactaccaattataataaaataatgattatgaaagtactataaataattgtatgccaataaattggataacctagatgaaatagacaaactcctagaaacacacaaaaatatgaataaaactataatcagtaacaagattcaatccataaaagcatttgatgaaattcaatattttttcataagaaaaacattctaagaatggaaggaaaccacctcaacataaaggcaatatgtgaaaaacccaatgctaacatcatactcaatggagaaagactgaaagcttcccctctatgagcaggaacaagacaaggatgcctgcttttgacacttttattcaacatagtattgaaaggtctagtcaaaaaaattaggcaagaattttaaaaaagacattcaaattggaaggaaggagtaaaattatttctgtttacagataacttgaacttatatgtagaaaatcctaaaggtggaacaaacttattagaattaataaataaattcagtaatgttgcacaatacaaaatcaacattcaaacatcagttgtatttcaatacactaaccatgaacaatctgaagggaagttaagaaaaataatttcaatttatattaacctcaaaaagaataaaatatttaagaataaccaaagaggtgaaatgattatacctgaaatctgcaaaatattgctgaaagaaatgaaagacaatatcaataaatggaaagacattttgttttcatgaattggaagactcaatattgttaggaggacagtgctacccaaagtgagctgtggattcaatgcaattccttcagaatctcagtgacatttttgcagaaaaagaaaaatctgtcctaaaatttatattgaatctcatgactctaaatagacacacagctttgaagaggaagaatgaagctggaggactcagacttcctgatttcagcatttactacaaagccccagtaatcaatacagtgtggtactggcataaaggaggacatagaaattaatgaaatatcatagcccagaaagaaatgcttgcatatatggccaaatgattttcatcgagtgtgccaagatcattcaatggggaagggacagtgttctcaccaaatggtattgggaaagctggatatccaagggcaagaagagtggaacctttacctaacaccatgtacaaaaattaacccacaataaatcatagatctaaatgtgagagcaaaaactatacaactcttagaagaaaagcttcatgatactggatttcacaataattccttggttgtaacaacaaaagcataggcaacaaataaaatcaataaatcggacttcacaaaaatcaaaaccttttatatatcaaagaacattatcaagaaagtaaaaaggcaacccatgaaatgataaaaatatttgcaaattatatgtgtgataagaaattaatttccagaatacatgaaaagctacaagtcaacaacagcagacatccaaaaacccaattaaaaaatgaacaaaggattaaaatggagttttatccaaggaaggaacacaaatatccaataagcccatgcaaagttcctcagcatcatgaatacttagagatatacaaatcaaaaccacaatgttacaccacctcacaaaatttaggatggttttgataaacaataacaatgacagcaacacaaaacaacaggtgttttcaagtagatggaaaaattggagctctagtgcattgctgatgggaatgggaaatgttacagccactgtaaaaattggtgtgctgtttctcaaaaaattaaacaatgaattaccatttgatccagcaattccacttctggacatactccccatagaattgaaagaaatttgaacaaatatttgtacactgatgtttagagaagcattactcacactagccaaaaaatggaaacaactgaaaagtccattgaaagataagtgtgtaggcaaaggaggtgtatctatacattgaaatgttattcaaacttaacaaggaataaaattccaatatatcgtgcaaaatggatgaaccttgaagatattatgctaactgaaataagccagacacaaaaggtaattattatataattccatttataaaagatagagtagccagttacatagagacagaaagtagaatggtgggtgctaagtgttagggggagaaggagtgagagttactgtttattgggtacagaggtttaatatggtaagaggaaaaagttctggaaatggatagtgtgatggttacataacactaaattgcacacttagaaacagttaatggtaagccttatattagatatatatagtgtctggtagtcttaccctctctataattacacactttttggcactgcccctttcctgccatgcagagccccaggggtgaatcttcctatttctccagctctgcatcagtcactgtactcagtgctgtgtcccacgtgctgtgcccacagcctcatacagccagtgacttcagagccaggacgcagctcaggagtctgccctgaggttgcttctcttcttatttccttgcagcctggcccgggggaggcttggcttgaactggcagctcaatttagccaaattcaggacaggccaccaggactctttctccacacatgctggtcccaccccaggttgagtgaggcagggccagtcaccagaggagcccggagcagagcaggaagcagagtctgagctgctcctccctcacccaaggggcttcctcctctcatttgggggaaaagtgtgagcttgtttcaaagcctcagatgttccttgtagttcatggaagaggtacaagaaaacaaagacgtgacagaaggggatgagttggtgacagtgagaagcaactcgatgttcagcactctccttcttgtccctctgtgaagcctcttctaccacatagggctcagggctgataaagccccctccctacctttctcaggccagacacaaggtcagtcatgagaaaacagaaaaaaaaggagaagagagtctgtagagacaaattgggagggttcaggaggagaatttgggatttgcctgtgcccatgggacacaggctgggaataaaaatgttttcctgactcttctctgaaagctagatagactccacctaaaaccctattgccaaggatgctgggatccacttaccaatgactctgattgtcaaggatgtggagctttcctcgccagtggctgagttacgagcagagcaagcatagagcccattatgctttggagtaatctgagggataaagagcttttgtcctgatagctgaaacttcccattaattgtccaagaatactgtgctggtgggttagagtttgcgaagcaggacaagtcgaggttctctcctgaatagtaagaggtgactgaagggaaaattctggggaggtctggaccatctggaggaaagagaataaagccacagttgatgtcatctgagggaaggggaagctccttgtctcttaaagggacacagtgaccctctgagccaagacacaccctcaagtcccagccaaaccccctctatgttcactgagctgaagcctgaagtattcacctgtttctcccaccacaagctgtgggccccaagtctcccatgacaagagcatcccctctccttatattcttggttaaggctgtgtctacccaagttttcccagggcagggagtcatggccacctcggatgtccaaaagtaaaggtgtctgtacttggaccggagagagactgagaggcctggcccctggtcgtttggatttaagctggtgtcctggcccacagaggaacaaaagatacagaggacattcagggtgactgagtcactgcggatgccaccatatcggtcccgtatttcacattgatagggtcctgtttcatttctcgtgacactgggtagaatgaggatcctgttttcaatgggtcgctttaccctgggactgaccgggaggctctgacaatttagccaccaaatgtaggcatagttctcactcttaggttcacaggtgaaggttaagacatccttattctccctggggtttaagttgttgatggtgatgtagggcatgggcagctttgctgtgtggataacagagagaagattgtcctgtgtggcacctttgattcctccacaggcatccttcaatcagagttggcatctcccacctctcagcccacccgagtccttgaaagccaatagctggtgcgtgtgtcacaagacagatgcatgatgatctaagggctcaaagactgtgaggccgcctgcttcatcttaggaaagcacagactttctgaagtgtcaattgagcagcagtgttgggtcatggacagatacgtcagtgggagtcacagcccctggtacccctcccagtccctccataatcagttgactggctggctcaccttgggttccttacctggaatgtgcaactgctgggccccttccaaattccatcctactttgcccccctagatgtgatttctctgcagcttccatttccaaggacattctagagatcagtaataatgggacttcccattgtcctgaaaccctgaagatactgagcagcctggcctgggactggatgtttcagcagaaataacacaggggagaccagagtcaagcctggaggtcagttcagtcatcaggcagtggaggcagaaagtggggcagtgttttgcaggtgtttcatgatgacttacttgaaccagtgacctctaaagatagagcagagcgcaaggaatgatctaggaagagtgaaggggataggcaagagctggtggctttggagcagaaccatgttccctgtcctgggtcctttaagtttcctttccttctgcagagggcaggtgaggaccatgtggatctttccagaaatacatgtggacatttgcaaatgcagaactgactggtggaaagggtgggaatgaactgctggaaatctggtcctcatggaccatatgtgtttgatggatatgagacaaatttggagaaaagttttgcaagtagtttctttcattggatattctactctctgatcccctgggttcgactactctagggacctcatgtaaatggattccagagtgaatatgagaagagactgctggttgccaggagctgggagtggggagaatcagaagttgttcatgggtgtgcagtttccgttatacaagttggggagtttctagagatctgctgtagagcttgatgcgtattgttcacacagattatttcttatgcataagacttaggacaaaaagtgttttggatttctgacattttttgattctgaaatatttgtcatatacttactggtttagcatcccaaatctgaaagattcaaaatctaaaatgcttcagtgagaatttcttttcagcatcagattagtagacaaaagtgggaagtgataagccaaatatattcttgcccttttttttctctcaccacatttctagcttggtgattagttttcggtgaattccatactggccatgctgcactcatatatatttgaaggctttgggatgtgagaaaggctgattgctattttctatgtcatcaaaactttccaccttttcatggttgcatctttttcacagtgtttctgttgtggcagtcattaataagtgcctgtcaggtcagatttaggacagagttttctaattctgcaaaaaatgttactgggattctagtaggggttgcattgaatctgcaactcactttgggtagtattgtctttctaacaatattgattcttccagtccatgaaaatgaagtgtctttccatataatgatattgtctttaatttctttcagcaatgttttgtagttttcaaggtataatcatttgacctttttggttaaacttattccaaaatattttattccttttcatgttaatgtgaattgaaattctttccttaatttcctttcagattgttcattgttagtgtatagtctaaagaatgatctagaaagagtgaaggggacaggcaaatgctggtggttttggagcagaaacatattccctgtcctgggtttttgattttccctctccctttgcagagggcaggtggctcttccctgatagctagatagacttccctggaaaacatagtgccaatgctccagggatccacttaccagggactatgatcctcttgattatgagatttgttccaccagtggctgagttatggatgaaacagacatagacccctctatatgttttagtgatttggggtatgaagaacacttgtgctgattgctggaacttcccaccaatcagccaagaatgctctgccagtgggtgagtgtctatgagacaggagagcttggggacttcccctgtatggtaataggtgtatgaggaagaaatggtgagggcatccaggccatctggagcaaagagaataaagtcacaggtgacattgtcagagggaagggaaaatcctggtctgtggaagggccacagtgaccctgtgagccaagtcgcaagactgaagtcccagccaaatcctcgctgtgttcactgatctggagcctgagacattcacctgtttctcccatcacaatctgtggaccctgagcctcccatgacaggagcagcctcttttctcccactgtggatcaagcctaggcctactgtggtttgtctggggcagaaagtcatggccagctttgatgtccagtggtaaaggtctctgtacttggacctgagagggactgagaggcctggcctctggccatgtgtatttgggatggcagcctggctcacagaggaacagaagatactcacggaggagattcagggtgactgggtcactgcggctggcactccctgagttccatatttcacattcatagggtcctgcagtatactttgtgacaccaaatagaaagagggtcctgttggtttcagacagctgcatcctatgagtcatagggaggctctgaccattcatccaccacaggtagcttgcgtccggagtctcaggattacaggttaagatcacagtctccatggcctccctggggtttaagttgctgctggagatggagggcttgggagtctccactgtgcagaaaacagagagaagattgccctgtgtggcacctttgattcctccaaaggcatttttcaatcagaattggcatttgccacctctcagcccacccgagtccctaaaagcccatggcaggtgtgtgtgttacaacacagatgcatggcattctgaaggctaagagattgtgaggctgcctgctttatgtgggagaagcacagactttctcaggtgtgaattgagcagcagcattgggtcatggaaagacacaggaccagcagtcatagcccctggtgcctctctgagtccctccatctccaactgcctgcctggcccaccttttggtcctgacttggagcatgcagtgctggaatcttcttagtttcagtcttacttttccccccaaggtatgttttctctgcagcttcccttgccaaggacatcctagagatggatgatggaacttcccattgtccttaaaccctttgggtactggaaagcctggcctgggactgggtacttcagcagaaataacacaggggagaccagagtcaagcctggaggtcagttcagtcatcaggcagtgcagccacaaggtggggcagttttcccaggtgtctcatagtgactgacttgagccagtgacctctaaagatagagcagagtccaaggaatgacctacaaagagtgaaggggacaggcaagagctgatagctttgaaccaagaccatgttccctgttgtgggtctatgatgctcccttcccccagtagagggcaggtgaggaccatgtggatctttctggaaatacatgtggatgtttgcaaatgcagaactgactggtggaaagggcaaacatgaactgatgatggaagtctggccctcatggaccatatgtgtttggtagatattagaccaatatttgggaagaagtcttgcagatactttctctcattagacattctaccctctgattctgagtttgactactctatgtacctgatatcagtggattccagagtgaatcagagtgtagaatagtagtttccaggagctgggatcaggggaattgggtgttgttccgtgggtgtgcggtttcagttatgcaggacgaggaggttctagagatctcctgtacagattcatgcctatagttcatacagataaagtgcttcttatgcagaaaggttaaaacaaagtgttttggaattctaattttttttattttggaatatttgcagtacatgtactggtttagcatcccaaatctgaaaaatttaaaatccacaatgcgccagtgagcacttctttttagcatcacatcagtggtcagaagtgtaaagttttggagcatttcagattgtggatttctggatttgggatgctccatatttaatactgtaattatcccataaaaagttgtcaggagattagacctcatgttgtgttctgactctagtaacaaaaaaaaaatttggaggaaacattaaaatgttttcataagtggaaatttttactgatggtctaaacatctaagatcaattgctggtagtagtatttctcttgagaccaacataaggtttaggtgtgccatgaattccagcaggatcacattatgctcaaagaaagatgccaaaggtgatttgaaattagcagctccttaagtagagagagtcccgttaaaaggacagaactggtcagtgcatcaattacataaaaggaggaaggatgccaaattaaaagaagtgatgtgtgttatgttagtaaatatagaaagaacttcctgcttctaatttctgtgcagttaggaaaaatggggaggaccccaaaacaggtatgtgaaatgctttcttcattttctgttaagctcaggaaacaccactagagtttaagtttgtgtgaattagaaggagtctaagtgagatgccaatggctcatgtgtctccccacacgaagaactccaacttatgaaaacggcatcatcatgaggaaacagttgtatgtggcacaggcagtaaaaccatcagatagcacccacctggccacctccaactagtccccaaaaccaccagtattcctcttaagtatgtgttacagcctttgtagttgtcccacagctacaaaattttaaaaatgctattgtcaaaacaaaatattaaatatgaagttgaatatgttgatccactttttttccctactctttttggactttcctgtttcagttttggaaatttctattgacacatcctcaagctagggattccttcctcagctgtgtgcagtctaccagtaagcatcaaaagaattcttcatttctcttacagcatttttattttttctgagagagactcttgctctgccaggctggagtgcagtggcatgatctcagctcactgcaagctccacctcccgggttcacaccattctcctgcctcgacctcccaagtagctggtactacaggtgcccaccaccatgcccagctaattttttgtatttttagcacagatgggctttaaccatgttagccaggatggtctccatctcctgaccttgtgcctgccccagtctcccaaagtgctgcgattataggcatcagccactgtgcccagccatctcaaagggattttaatgagttgttgacttttgagtttgttcagctttttacttagtgttagaaccgagtgacaaatttcaagcttgtcatatgcctgacacgaagccagaagtctctaggaagtgatcagagaatgtaagctccatagcacgttgacgatggagtcatgagtgaaacaggtgaaatgagctcatgggctttggagactgcaggcctgtccagcctctgacaccctggtgagtcagtgcagagattacaacagtgacagcaaactagcatggctgactccatctggcatctagtctcaggctggctgtcctcactcattcctgcacatagacaaggctaaccttgggagaaatttagtttatggtttaactttgaagcaagaatgataatagttcctccataaaactaacacccttactttgcccagggactgcctttgtcaaactagtgaaagaccatgagatttagattataagagggaactgaattctgctaaaatgtatgcacagtttctataatccctgactgctgcaatgtcatttggcaagggtttacaaaatttgtaactaattgctcctatagataacatcactattgtagaacgtgagattggtcttttgagatgcttctcattcttttgcattctggcaaccagctgacctcatccatacctatgactaatggctcagcccgtcatgtggtccctacctagaggcagattcaagcacaaacagatcatttccctccgcccgcatgattccatcaccaacaatcagcagtactcattttttagtcctgtgcccctgaaactatccttgaaaatctctaagccctgatccactggggaggctgatttcagtaataataaacctctgtcctcctgtttggcagacttggagtcattaaaatctttctttactaaaaatcaccatttcaataaatttgtgtgtttgtgtgtgtgtgtgcaggaggccagaagaacttgtctgacaatgataagagtggttggagggacttcctatccctgtcccatggtcttgtccacaggtcagcctcacaaaggggaagagcccttgatgggaatacagtggaagctcattctcttagtgacctggggacattggctcgagatgaagcctggcaggagtggcaactccaggtgatttctgcacctttcctatttcctgggaggtgggccaggccacagtgttagcgggaagggaatagaacagccagcctagttagagggagtgtctggggaaggcctaggggtgggggaagaagctgtgcaggacagggcttgccagtcagaatgaagtgggaggaagatgagggacacagagaagcagagagaggcagagacaccatggcagtgagcagtgagggagacactgacttcagagcccccaggaaccagctgcccccagttccacagtccaggaccaaggagccccgagaaccctctggtggccaaagagcttcagagttacatgaggtggggtggctttaggggcaagaggtagtggggggatgaaacatgggtgtcagcctctgaaggacaagggacaggtgtggctagaacctcctaggattctgcattcaagatccagtctctaaagaggttttggatcattcatttcttcattccattccttcatttgttatgtgagagctcctgagtgtgtgtctctcgctgggcctgtgctggtgtagggagtgagtggggaaagaaaacaaggtcctctccttgatcctctcatgacagtgacatggacactttgggaaacacagagtttcaggttcagtgatgggggttaagatctgagggggaggcctggacattttttttgcactgactttgatggttgaagcaggtgatttagttctggagtatagactaatcagctgaccatttgctctcactcctctgaggtttggatgcctaagaagagaggatttgagccaataaatgactatggggtgcttggaacccagtaagccctcacttctggtggaggagaggatgggcctgtggctgcagacagacctcatgtgaccctgatctcccctttgcgtttgtgtgactctgattcagtgactgtgccttcctgtgcctcagttttctctcaatcagataagttaaatggcaaatggactgtggcttttcatgctatctgtgaataaatgttaaattattcacagtcacctgacctaatgcttggcacagtggaggtgttcacacaagcagcatttattattaatttgcttccatgagaaagcacctttacgtcagatccctgtggacaagctgctaccaggtacatcttctctcttctgtttctgcttctgaggacattagactttctatggactgtcctaagcctcctaaggcagttggctgatgacctacaaagcttgtctttctgtcctctccactctgagtgtcaggtgaagaaagctctgtccttgcccagatgaggctctgagggctgagccctggctggtgaacagctccaggagacacagtcctcagacagctggtaaattcttggtcccagtaagccctgcccaagaagccacaacccagccctggaacaggctcctcagctttatctggaacaaggatttaggtacagagttctgggtttgaggcttctagggctgagcttctctgagagtatctcaggggcccctcaggtcaaattctactcagttctccagggtctttctcagggtcaaatttatgaagagggcatgaggtgcttggctgagactgatctcctcctgctgagtccccccatcagactgtccttcctctgcagcgagtgtctgcagggtctggatgcgggaaaggaattctgatctgttgaaatttgtctcctctgtgtgtgtcctgcactaaatgcccaaaccccagcatgggacataatgcagagagggacacaggcaatgtccaggcctgacaatcctgtgtgtgtgatgtagaagtgacccctgtcccccaacacccagggatcatgtggaatcacttacggtataaggtgaaggtgaaatatccagttactcctctagtcccatcacctcgctttatgatgtgtaaggtgtaggatcctgcgtcctcccgggtgacattctggatcagcagggatgcattggaatatactgtttctcgtccactgtatgccggtccatatataattatttgaccgtctactacatatgatgtaatgtaatggtagaggtccctgatttgccctttgtaccagatgtagccagtaagattctggggcaaattgtggacaagtagaagaacatccttcccctcggacactttgggtggctgggcttcaatcatgacttgggcagtggtaggcaagttccagaagtttaaaagtaatgctaggaggtggagagagcatcagtcaatattgagacctatgtattggggtgaaaagatggggccctgagtcctgagaaggtctcttcaatcctcagccttgaagacacacacacacacacacacacacatacaaacatacacacacagaaaaggggcatgtgtgtttgtgtatgtgtatgtgtgtgtgttctactgtcctactaggtcaaggtcagcagcatgacccccattccttcaacacttctgaccttggcatttttctgtttggaatcctcttccccaggggtccgcatggccccctccacactgccctcaggtcctgctcacatcagggcatccttagacttctttcctgacacctccttcagggactctgggtcttccctttctgacctttccctgctctgctccctccagggttcttgtcaacacctgacctcacattctagatctctttgcatgtctgacttcctccccatggcagcatgagctccgtgaggacagggacttttgtgatcttggttgcaccccagtgcctggaacaggctgcagactcctgtagatgtgagagttctcagggccgtccacgccctgggtgtttttttttttttccccaattgttgaggttttttattgaggacagtgtttcatgccctgtttatttttatttgtagtgtcatctgatatagttattattatcatttttcaaaatgtggtggcccctgatgattaatcaggaaaacagaacacctgtttcctacctcttaccaattccggttcaatgtgactttcctgttttgacccctgtccctcttgggtgtattttcccctatccaggcatcaacagggccttctttcctttttttttttttttttctctttttttttttttttttttttttgagatggagtctcgtactgtcacccagcctggcgtgcagtggcactatctcagctcactgcaacttccgccaccctggttcacgtgattctcctgccttggcctcctgagtagctaggattacaggagcacaccaccatacctggttaattttttgtacttttagaagagacagggcttcactctgttggctggactgatcttgaactcctgatctcgtgatccacccacctcagcctccctaaatgctggcttttttattttttagaaccccaggagcctctccaggagaccccatccagtcactctgcttcctcctcctgtcctctcccaggaagttctctcctcacctgtgagcaggagccccttccatttgatgtgctctgtgcagggaggggctgagaggggccccatgatctctgctgcgtgcatgttctcctctgtggagatgagcctaggatccagaagcttccagagcacggctgtcagctgtgctgtccttcctccttctgcgctgagactcttcccggtggaaggagcacttctcaagctcatgggcagggtcaggccgaggacacctctctgtcccctcctctctcagccctgcctccttgtccctccttctgtttttccttttgtctgtgtttcaggtccctgggaattgtggaggcctctgcctttttcagcagtgattctttcaccaaacctcaatacacactttgtgcggacacacacatacacacacacacagaagagacacacacagacccacacagtcagacacataccctgcaggttgggcaagcagagtcctgggcctcagcctcctgctgtccccattgctcttggtcggggtgcacattcacaccctttgccctctttcatccccgtctggctctccccttcagtgcaggaggctggagctgcaccaggtccctgtcagagtgacaccccattgtgctgtgggtgagctgtgtgttgcctggtgagagggacccttcttttctccaatcgtgtctagcttggctgcagcttccaaggatggacattgaggacctgggtttcccagaggaaactgtccttcctggaggtgtgcagggtgaatctttcatgcctcctgggaggagaggcctgtgctggttgctcagtgggggctgtgagtcccatagtcaaagggaaagttctcggtcactctgtgactccatggggtctggcagctgagctggagctcttggtttctcatgttcttcctgacaatctttgatgtcctttcttctctgccgagctgattgtcctgtggtcaccacaccttccccgtggtggtgcaggaggaagtggggagttacccaggaatcccgcgggacatgacttattgagacgcaggaggaggagcctgggacagagcaggggttcagagctggagagattcatcccgacttactccgtggccatgatgggctcagccctccatgtgctgagatacccaggggtctgtcctgagggttttgacctggccaagctgctgtgtgtagaggaggaacaggcagtggccagagatcctgtctggagggacgtagctcacacctgagagggcgggtgggggtgagttgtgttctgggagcaaagagcaataacaccccccttctccccgcaagcacacgggagacgtctgtcttcccaagagacagctgggggtaggtggccacatcccggatggtgcctgtgtgtgaccatcacacgcgctctgagccctccggggttcagtgagcaggcaggtcacagggtgcctggctgattcccggtgaggctgtgggccctcaggcagccgctattctgtgtcagcgctaagcttggcctgggatgccccagtgaacaggacagatggagcaggggtgggcatttagggagcagtgacagaaagagttgatgttgatggagggaggtcacgaggggaaagcgcccagtgtggcatcgcgtgcaccagcgctgccctgggagatgcctttagctgggcccagggaaggagcaggtgtgtggggcaggaactacctgtagggggagtggtgttaggttggtggcccccaggtcagggaggagctgacagagaccctgtggggagcatggagggcgctgaggacttagtccgaagtgaccctggtgagggtggaccctgctgggctgtgggttccgctgagggcggttggcatcccttgggaagactccaggccgggagggactctgtcgccttctggtggacagggagggaagtgtgaacggcagcaatcccaggccaggctgcatgttttattctacgtggatctgcacacttcacacaaggtcacacatatgttatgttatagctccttcaccttccagccccgtgagtcccagtctgtgtggctctacgttcactgttctccctctttcacgatcagatatcccaaacgcagatgtttgtcactttctgtgagtttgtgtttgtgtgcagtaggcggcactgtgtataccctgggggcagtgatgtctggggctgagcgctgcacttgggcttgggagaagaagacggagcagcagggtgggaagatcaatgtcaggggggcagggacatcattttcattttctcccagggaccagaacccacgattttgactccagggcacagtaccacaccctgctggtgtccctggatgtcatgatgctcatagtgtcatgttgccttggcattcattttttaagttgtaagtttatttgcctcaaatcagaggcagggcttggtcaccatggcagttttcaatactgtatctggttcaggtggctccagttggtgtccagagataaaatcttagaggcatctctcctgcttggtgtgctggactcccctctctccagctgctttctttaaactgataattctgacattcgccctcatatttaaagtgaccacctctcagtcacagcgtgagctcctggtcccagtgtttgctgctttctttgaacacatccattaaagctccctgctggaaatctgtcatataacaccctggacttaataaagccattggcttaccagtctcttctctcctccctgcctgggctcactgaactctgtgtctgcggtctccaggtgtgccgagtgctccctagtgtctgtaagtagtaaaaatactgacattttcactttgtggttgtatcattgtagcctcacatgccatccagaggctgacattgaggctgccctatgggacctgtgctggttgagcctctgctggagctcttgttttggggcctctggtactcctggggacaggagcttccaggtaacttgattgaaaaactcatgcctttcattgaaacactgggtcagatgatgtattcatgggcttcagctgccataacaaatgccttagcctgggtgaattacataacagaaatctatttttcacagttctgtgaataatgtgctattctaaccactttaagatgcacaatcaagtgaaattaaccacatacacagtgttaaattaccatcaccactatttttcctagaaaatttttatcactttaaactgaaactttgtatctttcaaacaatacctccctgtatgttccaccctagactttgatcatctctactctgtctctatgaatttgcctattcttgatgtttcatataaatggaattatacaatgatgttattttgtttctgacatatttcacttagcataatgtttccatagtccatgcatgttccagtgggtgtcagagcttcattcctctttatggcagattaacattctgttgtatgtgtcaccatatttatttattcatgcattgatgagcacttggattgttttcatatttaatcttttgtgaataatgctgcaatcaacactatcatgcaagtacctgtttgagtcctggatttaattctttgggtatatacctaggaatggatgttgtttcaaatgagaattatatgattagctttttgaggaacagcaaaactgtttctcctagaggctgtacctttttatattctcacgagcaatatatgaggattccaaattctacataatactgctacttgttatttaacattttaaaagaatggtaaccagttttgtagatgtgatgtggtgtctcattgcagctttgactttgtgttttcctgatgactaatgatgttgagtatcttttcatgtccttcttgactctttgtatatcttctttgaagaaatgtctatttgactcttttgcccatttataaattggatgatttgtcctttctttattgagttgtagctagttctttatattatctgaacatgaaaactgcctatatgtggtttgcaaatattttctctcattctgtgtctattaattactttcttgataatttcctttgatgtacaaaatgctcacatcttgataaagcccaatatatcttgtttttcttctttctcatgcttttgtatcatatctaagaatccattgcacatttgaggtcatcaatatttacctctatgtctactttgagatgtttttatggttataggtcttatatttaactcactgatcaattttttagggaattgtttgatacggtgtgaggtagagttatctaaattcactgttttgcatgtggttatctagttgtttctgcactatcattagaaaggagaattgttcctccattaagttgtcttgacactctcttcaaagactaattgaccataagtgtgagggtttgcttctagactctcaattctatcccatttgtctttatgttcattcttttgccagcagcttgttttaataattgtactcctttgtgagatttcaaataagaaagttcaagtcctacaatttattttggcaagattcttttggctattcagggatccttttttgaaaggtggggaggcgaatgtttcaccattgggaaagccttttctgtcttcttcatggggaaatttgggagagccttttaaaaaactttatctaagtaggtaaactgtcaccactttatttgctgaagtgctatgttaaagtgtgccttgcctcttgtggaagaattgtgagaccctggaagcacttgcccacgtggtgagagacagtgagttccacgatgaggggcagagaggacattgttttgggatacaatgttgttgggggaggtgtatacatctcaacttctttatgtctctgtgcagtgggtgtagggagcagccccacagggtcggtgggtttttctccccatgtgcagagatgagagattgtagaaacaaagacacaagacaaagagataaaagaaaagacaactgggcccgggggaccactaccaccaagacgcggagaccggtagtggccccaaatgccaggctgtggtgatatttattggatacaagacaaagtgtcaggataaggagtgtgagccatctccaattataggtaaggtcacatgggtcacatgtccactggacagggggcccttccctgcctggcagccaaggcagagagagaaagaagaaagagagagagagcttacagcattatttctgcttattacagacttttagtactttcactaatttgctactgctaactaaacggcagaggcaagtgtacaggatggaacatgaaggcggactaggagcgtgaccactgaagcacagcatcatagggagatggtgaggcctctggataactgcaggtggacctgagtaatgtcaggccctccacaagaggtggaggggtagagtcttctctaaactcccccagggaaagggagactccctttcccagtctgctaagtagtgggtgtgtttccttgacactgaggctaccactagaccaaggtctgcttggcaacaggcatcttcccagattctggcgttacctctagaccaaggagccctctagtgcccctgtctgggcataacagaaggctcgcactcttgtcttctggtcacttctcactgtgtctcctcagctcctatctctgtatggcctggcttttcctaggttatgattacagagtgatgattactctaatgttggaataaaaagtaattcctaccaactaatgattaatgatattcacatataatcatatctaagatctgtatctggtataactattcttttatattttatgatactggaacagctcatgccctgagtctcttgcctcagcacctgggtggcttgccgcccacaagtgggcacctccattggacacagtaggttttgaaatccttgtttatcctctggggtctgggtcttggcttacctgttagctgcagctgaaagaggtgtctgctaaggcaatgacacctgtggggagaagaagggttcagcagagtgaaagcagctggggctcagaaaagccaggaaagtctgactcttagaaactgtgggttagcagatgggtgtcctcaggggtaaatgggccatgccagtagccactgcagtggactggaagaaggtaagtgatgctgggtatcccatgttctgtctcagctctgcagctgaagatttgggccctatgctggtacggccctgcagcaggggaagggtacacaggaatggctgcatatcaggaccaagtccatgtcatcttcttaggcattgttactgcagatggaggattctgttcagagacctggcctggacacatgggagggcccaccccattcttttaaaattattttaagagaacagtattagcaaatgtggtacatgttttattctgctagaatcagcattactgtcacgttttacaacgtatctcttaggaaatcatgagagccatccacacaatgtggatttaaaggggactctactataatttcagctttcctactctttatagaaaccatcttctctgcaaacacacaggcaatatctctgtgttcatttctattgggagccctgtatgcaaggtggagagagccacatttccccgtgagatgttatgtaaaagtttgaggttgagatgacatatctgacactctgttgttaccctcagaagctactacatgtgaaattctaatgactgcattatcctgccaaatgaaagaggcatgcatgagcaaggacagttaagaggggcgagagcctcatcatgatggggagtcttattttgacatcttggggagaactgtccacagtgtgaagtcatcaacttgttgtcctggtttacagtttgagcatctgttgttatgctgtccaacattttggtgagttctgagtggctcacacttcaggtacaagaattttcccatgaaatttacattgagttgtcctcctcccacttatagggcttctggaacagagtgggtcttggtcttagtgattccatgggagaaaatggaattggaggaactagtagaattcagggtaatgtccagtctacaggtgaataataaaaacacagaaacaatgaacagagctgcaatctcataaccggtatactacagtttttattttccacataatttttctctctatgggcatctctagttttaccaatgataatttcagtagaataagtttgtttgcaaaataagttgagtttcttcaaacatagtctgattctttacataagtgcagcaagagtagcaatgagccagataggctctcttttaaaattttctttgctctaagtttttataaggaatctgagattagacttttacaaacctcttgagaataggaagccaaaccaaggctgacttcagactttgcctgcagttcatattggttcattctaaatatattcttaaatataacaacccagtcaaagccttggtaatataacaaatgatttcaaatatgtcctgttaaaaatagagcagattgttactgtacttgtgcaaatatgtgtattaccttaaacatatcaacactcatgaatagttgcccaattctggggcagtcagctagacagcaaaagtaagtgtttcaattattgttcccagaagtatagtttattgaactgctataagctatagatagattaaaaaaattccatgaatctagaaaataaaacatttaaagaatcagcaaattttcaaataaaaatcttaaaaacattatcctcattatgatcaattatttcaatgaaatcaatgtttttcctgcttggtaggcttagaattttctgaagatatcagcctgtttgttaaaggtttgtaagttcttagacagtccagtggtataatctgaaagttatcagaaacttgtattaaagtctacttgtcagcatcttttccataaatctccttgaaaaggaagcaattttggactgtagctgattggaaatgctttgaggaagaataaaaacaacgtgtgtgaatgacaaagattttaaatgactatggttaaaactctgatgagaattcattatgataacacagctcacataaaaagttcgttacttctgtggtacatgacattatggctgataacataattaatttctaggaatctcatacaatttctggaacaatcatatcagtaacatatccataaatataacatagagaaggtttagcttcctttactacttatgatttgaaaatgcttttcagataattttacatgtcaaataaagtggcttttccatgtagcttgtgtttctcaacaggattattgagtacttggtggaggacattaatgaatagggccaagaaagtataggcttatgtatgctgaaaaatttccctagataattccaatactcccagctaataatcatgaaattaggtctaagttttacctattagaacagctgttctttatcctggttacacattagtagcatctaggaagacttaaaaattaccaatgtctgagtctcactttagaccattaaattggatcctatgggtggggcttgggcatccatttaaaaaaacgttttccagtgattccaatgtgtagctgtatttcccctcagatttctctgatttcttttggcattcacttttttctattttggtattataattatttttctggtcttatcatctatcttaggctttatgttccttggggtagaaaccttgcttcttcgtttctgtatctttcatgaacgtatgagagggtcatcaggaaaatgttttcagtcacatgtaggttgtgttctgagtctcaggttttcacattaatgctggagtcattgttctctgggaggtcagaggttgcttgtgatgaagggtatgggtaagcccataatgcagatggtagatgggagatcaccctgtttttagccatagcactggaactaagcattctatgtgtatatcaggtggaggggaagggatgtgtagaaagagagatttagttacaatggggaattactctagggaatagaggtaatggaagcaatacaaattagtaaagagaagaaatgtgaacttatcaaataggcaagagtagatccctgaagatttttgaataggggagttaactagaatttaggaaggtaataaggcagtcatacacaaggaaggtttcaaaaactggagataagtcaagcagtacctctagcagttgttgaggttgtgggaatggagagaatgacacaagtgagagatgttaaaaaaaggatcaagagggtgttataaggtattgaatctgggagacaaatgagcagaggctgaggataatcatttgtaggagacagtggggtacagggagcatgaagaacaggggagaagagacctgcaggaatgagtgctgagaagcaggagtttagtgggaggaggaggagatccagtcccagatatgggcaaagaagtcctttccctctcccaagcatggcagtcagccctgcaggaaacaggacaaaaggaaaggccatcatacctgctagtcttcctgaaataaactacaccagggctggtagatcagagccacactggccagtactccaatcatgatgctgacagtggctctacctgaaaggccaggacaacttcctttcactgaagtatctgtcatggaaagaaaagaagagaaggaataaaggtgatgttattttacagtgtggtaccttaggaaccatcactaagtatgaagtagtttctacttgttcctttggggattacattaattttgtgggagggttgctggtagatgattagccaactatattcttgcagattttttctctctcaatgtgtttctaggttagtgatcagtcttctgtcaatttcatcctgaccttgctcactcagatatttttgaaacctttatgatgtgagaaaggctgactgctattttctgtgtcattagaactttctacccttccatggttgcatctttttctcagtgtgtcagttgtggtaggcatgaataagactctgtcaggtctccatggcagcttgtgtttctcaagaggattactgagttcttggtggagcacattaatgaatagggccgagaaagtataggcttatgtatgttgaaaaatgtccctaggtaattccagcactcccagctaaaaattgattaattaataatcaattgacttgattgacagaaggcccagatcagtgcatcccaaaatgacaacctactttacatagagtcctcactttcctgaagctcccagcagggaaatgaaagcaagcccagttctatgagcctctgttttattctcctgggtgactggtgggaagactccccatcagtcttctcatgctctgtttgaactgtagctaaatcttctttctcttttgccttcacaggaatcagatttgcctagtggtcccaaagctccccaggcttttttcatgcctgccccactttccctcacaggcatttttcctaatacattatcctgcatgtctaatctcatcttggatgcatctcagtgggcataaactaacataccaggtttgatttttttgcacttagcttttttctctctctcccacatgtagccagtaaccatgtcctagtgttttatgtgttacctcttttttcatgtgtatagaaaaaaatgtatatttccatatacttatttatacataatatatataataaaatatgtaatataaaatgtataataatttaaaacatatacatattttctatatatgtatatggaaaaagaggtaacacatgaaaaaccaggacatttacatataataaaattgacatatgttatatatgtatgtagtgtctggtagtcttaccctctctataaatacacaatttttgtcactgccccttccttccttcccatgcacagctcccatggccaaatgtccctatttctcaaagtgtgtgtcactcactgtcgtctgtgctgtgtcccatgtgctgtgtccacagcctcctagtgttttatgtgttctctttttctatatatatggaaaaagcatatacatatttctctctatagatttatatacaatatataataatctaaaaatatagaataacaatttaaaatatgtacatatttccatatctatgaaaaaaggtaacacataaacactaggccatttatatataaaatccacatatgtaatataaatgccaattttatcatatataaataagtatatacaagatacacttaacatatataaggtaaatttggaatgccctgaccagggccctctgtcagtcaagtccctgccatggaggccattcatggctgccacaactgagacactgagagaaagatgcaactatgaaaaggtgaaaagttctaaagtcatagaaaatagcaatcagcctttctcacatcccaaaaccttcaaaaatatctgagtgcagcatgtccaagatggaattaaaaacttcaatcttcaaaaggaaaaaggtagctggaggactcacactttcagatttcagcatctactgcaaagctacagtaatcaatacagtgtggtactggcataaaggaggacatagaaatgaatgacagggaatagagagcccagaaaaaaagcttgcatatatggccaaatgatttttgtcaagagtgccaagaccattccatggggaaaggacagtctttttaacaagtgatactgggaaagctggctatccatggacaagtatgagttgaacctttacctcacaccatatacaaaaaaatgaacccacaatggatcaaagacctaaatggaatagtgaagactaccagactcttagaagaaaacataaggaaaaagcttcatgatattgaatttcagaatgatttattagttacaactacaaaagcataggcaacaaaaaagggattaattgggcttcatgaaaattataaatatttatatgtcaaaggccattatcaagaatgtaaaaaggcaaactatgacatagggaaaatatctgcaaatcatatatctgataagggattaatttccagaatacatgaagaacactacaaatcaaaaacagcaaaaacacaaaagcccaattaaaaaatggacaaaggactaaaatagagattttattaaagaagatatacaaatggccaatgaggacatgcaaggattctcaatattactaatatttagagatatgcaaagcaaaaccagagtgatacacgacctcacacacattaggatggctttgataaaaacaacatgaacaacaacatcacgaaacaagtgttttcaagtacgtggaaaaattgaagctctttgagtattgctgatgggaatgggaaatgttatagccattgtagaaaaagtggcatggcacggccggctcatgcctgtaatcccagcactttgggagccgagatgggtggatctcttgaggtcaggagtttgagaacagcccggcaggcatggtgaaaccccatctctactaaaaatgcaaaaattagctgggtatggtggcatgtgcctgtaatcccagctactcaggatgctgaggcatgagaatcacttgaacctgggacgtggaggttgcagtgagccaagattgcaccattgcactccagtctgggtgacagagcaagatcctgtctcaacatcatcaacagaaaagaaaacggtatgtcagtttcttaaaaaaattaaagcattaccacttaaaccagcaattctacttctggacatacagccaaaagtattgaaaaatatttgaacagatatttgtacactgatgttcacagcagcattattcacaatagccaatgggtggaaacaaccgaaaagtctattgaaagataagtggatgaacaaaaacatatatccatactttggaatgttcttcaatcttagcaagggataaaattttgacacatggtgcaaaatggatgaaccgtgaagacattatgcgaagtgaaataagccagacacaaaaggataattattatatacttccatttatgtaagatagttagaatagtcagttacttagagacagaaattagaatggtgattaccaggggttaaggggagaaggaatgagagttatcatttattgggttcagaggtttagtatagtaggataaaaacagctctggaaatagatagtgttgatagtaacacaacagtaaattgcactcttagaaacagttaatagtaagtcttagatacatagtgtctggtactcttaccctctctgtaagtacacactttttgtcactgttccttccctgccatagagagcttctgtgagttaatctccctatttctccaagtgtgcatcactcactgtcctctgtgctgtgttccaggagctgtgtccacaaactcagacaggcagtgacttcagagccaggacacagccctattcccattttttaaagccttacccatgggaggcttggcttctactggccgctcgatttagccagattcagaacaggccacccaggcaccttatccacatgccctagtcccagcccgggtggagtcagggcagggtcggtcacttggcgagcccacagcaatgcagggagcagagtctgggctgcttctccctcaacaaggggcttcctcctctcatttgggaaaagggtgggcttgttttgaagactctgatgttcatcgcagctcatggagtacacacacacagacacagacacacacaaaggagacagaagggatgttttggtgacagaaacagcttgaccatgaggaccctcctctttctccctccatgaaggcccttatactgcatagtgcttggggctgataaagccatttccctacatttctcaggctggacccaaggtcatccaccagaaatttggaaaacaaagggaagagaatctgtagatatgaattgggagtgttcaggagaaaaatttgggatttacttttgtgcatgggacacaggctgagaataagaatgttttcctggctctttcttggaaagccagataggcttcacctgaaagcgtattgccaatgctccagcgattcacttaccagggactgtgattttcttggttgcgaagtttttgccattagtgactgggttatggacataacacagatagtccccactattctctgtagtgactagggggataaagagctcttgtcctgtttgctggttattcccattcagcagccaagaatactctgctgatgggttagagcccatgaggcaggagaggttgaggtttgaccctggatagtaataggtgtctgaagaataagttgtgggttcatctgggccatctggagcaaagagaataatgccacaggtaatgttatcagagggaatgggaagctcctggtctgtgaaagggacacaatgttcctttttgccaagtcacaaccccgaagtcccagccaaacttcctctgtgttcactgaactggaggagtctaagacattcacctgtttctcccatcacaagtgtggaacctgagtctcctaagaccagagaagctcctcccttcctgggcctacccaggtttgcctggggcaggaagtcatggccagcttgggggtccaggggtaagtgtcttcatacttggacctgagagggactgagaggcctggcctcgagttatgtggatttgggctggcagccttgtccatgaaggaaaagaggatactcacagagaacatccaggtgactgggtcaatttggctggtactcactacattcttgctttgacattcatagagtcctgtgtcactccgagtagagcaaggaccctgttgtcattggacatctgcagcctggaaatgactgtgagtctatgaccatttacccaccacatgtagattgtgccatgaatctcaggttcacaggttaagaccacagcctcctcatcctccacggggttgctggcaacatagggcttgagcagatttgctgtgcagataacagagaagattcccctgtgtggcaccgttgatttctccatgagcattttccaatcagagttgacatctcccacctctcagccaatccaagtccttaaaagcccacagcaggactgtgtgtcaaaagacagatggatgcatgattatctgagggctcagagaccacggggccacctgctctgtgtgggagatgcacagacttctgaagtgtgactcgagcagcaatattggtgaagtgtgaattgagcagggtcaaacaattagagtttgattaactttgtttaaattgagcagagtccaagtgaggcagcagtggctcatgcatctccccacccgaaggacctcaccttatgacaatgttgttattatgaatacacaggtgtgcaagaaacaggcagtaaatcaggcagcacccacctggccagctccacctggtcctaggaaccaccagtattcccattatgtgtatgttacagctttttaggctacaaaatataaaatacaatcacagaatataaaatatgctattgtcaacacaaaatattgaatatgaagctgaatatgttgttccactttttctcactcttgttaaactttgctgattcagttttggaagtttctattgacacacacttaagctagagattctttcctcagctgtgtgcagcctaccagtaagcccatggagagcattctttatttctcttaaagtgtttttaatctctagtatttcatttgcttctttcttagaatagtcatctctgtttaaatcacccatccattcctgaaaggtgtctcctttttccatcataatccttaaccagagttgttttaaatttccagtctgataatttcagcatccctaccacatctgtgtctggttctgatccttgctctgtctttcaaactgcattttttttttttttgccatagtctgtcttgtatttttttgaaaaccacacatgatgtactgtgtaaaagggacttgagtgagcaggcattcagtgacatggtggtgagtgtggggagggaagtgttctgtggttctggatgaggtctgtgtcctgggctgtgaatgtcacaagtgcctctcaggtttttctttccattaggtgggatatgatgacttgaggctggagttggatatttcccctccccctggccagttaagctcccatcaaaccccagctaattcggctgcagtaaaatagtttctcttaaatgtaggtcttaccaagaagaacataattcactgacaactttccaagtgtttttttcccttcttcctacaagaaggatgtggattctttttgaatattgactgtgagaacctggtagagctccaggagctaagagtcataaaactgtccccctactcccaggactaatccatccactgttgtgtttatctctgcgctgtgtccacactgagcctccagaatttcctcaattagagttcaggttttctgaccccagcactggttcccgctggggtttctgtgcctgtgtttctgctcaggtacggtgcgctgctctgtatttgcctgtgggtctctccaatatgtgggccagttagcactgagatcttgcttcctgagaaatctaaacgagttgttgatttttcagtttgttcagctttttacttgttgttagaactgcgtgaaaatttttaagctacttacatgcctgatggaaattcgaagtctctagggcatgacaggaggatatgagccccacagcaggttgaggagggagtcatgagtgaaatgggtgaaatgagcccgtgggctttggaaactgcagatctgtccttctgcctctgaccccctggtgagtccatgtagaaagtgaaaccaccattgcaaagcatatgatggagagaggaagctagcttggctgcccgcatctcacctctagcctcaaactggctctcttctctgattcctgggcataggccagggtaagcatgggaggaatttatagtttaactttgaagcaaggatgataatagtccctccctaaaattagctcctccttgtcgggggctaccttggtaaatctaagaaaagaccatgaattatgggaggggcccaaattctgctaaaatgcaggcatagtttctataatcccttactgctcaggagtcatgtgtccagaggtcacaagatttgtgactttcctagttgctcctatagatagcaagactactgtagaatctgagatttatcttttgagatgtttctcagacttttgcattctggcaaccagctgacctcatctagactcatgaccaatggctcaaccagtcatgtagtccccactcagaggcagattcaacaaatacataccattttcctacctgcatcatttcatctccagccagtcaacagtacttattccttagacctttgccccttcaaagtttttgaaaaaatctaacctctgagccattggggaagctgatttgagtcatgataaacttctgtcctcctgtttggcagccttgggctaagtaaaactattctttactacacatcaccttcacaataaattggctttgcctgtgcagagggcaagaacctgtcaggtgattgtaagaatggatggaggagtcactgatctctttcaggtggcctgtttcatgagtcagcctctcagagagaaagagccctggtctgggacacagtggaagctcattctcctgttggcccggggacattgcctcattatggatcctggcaggggtggctactctggctgattttggtgcatttttcatttcccagaaggcaggacaggcctcagtgtgagcaggaaggaaatggaaccatcagtcttgttagagaggatgtctggggaagtcctcagggtggaggaagctgtgcaggacagggttcatcaggtagaatgaaagggggatgcacttttttcactgaacacctttcagatgtctcactaactctggcctcactgggctctgcctttccttctgagccctgagccctgagctctgagccctgattcctgggagggagggagggaggaagggtgaagctgggatgtgtgctgtccaggtttcttccatctctggaatcttgaaagcgagggaccctaatgtgttaccacagaggagaccatgggaaaaagctgtttctcaggggtgcctggcttatgaattgaggggaattcagaccaggttggactcgtgaactgcagggaccctgttccatgtcagcaaccagctcctctagctcagtgtttctctctgtggctaattcttttgtgtgatttctgagcccatgctagagtcctcctcacgatgcctgatggtcagacctgtgtggggagacctaatgatggggtgggggtggtcttgtgtgtcacacagagtgtccagggaacacactttgtgactttctctaccccagccccacaacaagatctggatagtgggcttggtcagataaagtcagaatccatgggggagggtatgtgtcctggcagtgctgaggttcgtacctccagcttagttctcagtctctgcaaatacatttatgttgtgcatgtgctgttttctggactgtacttcttgaacctgtctgcagataatgtcatgagagatctgcatggaagtatatgagggctatcagattagggtgggtgtgttttacatagtgggtttttttttcaccaaacacttttcaaaaaattgtggttgagtgtgtatatagaaacacatacatacttatatttgttagatgtgtatatacgtatatgtgtatatatgtgtgtgtgtgtgtgtgtgtgtgtgtgtgtgtgtatatatatatatataaaatgtgccattttaaccgcttcacttaaggggagagagagagagagagaagagagtttctactaataccaaatctgggttaaataagggtggtcctatttcctggggttggccctcttccttaatgggctgtatcttgagcacagtgattcagttgaagaacagagaccaaattaaaagctacattgctaaagaaacaacaggtgctggagaagatgtggagaaataggaacacttttacactgttggtgggattgtaaactagttcaaccattgtggaagtcagtgtggcgattcctcagggatctagaactagaaataccatttgacccagccatcccattactgggtatatagccaaaggattataaatcaagctgctataaagacacttgcacacgtatgtttattgtggcagtattcacaataacaaagacttggaggcaacccaaatgtccaacaatgatagactggattaagaaaatgtggcatatatacaccatggaacacttatgcagccataaaaaatgatgagttcatgtcctttgtagggacatggatgaagctggaaaccattattctcagcaaactatcgcaaggacaaaaaatcaaacaccacatgttctcactcataggtgggagttgaacggtgagaacacatggacacaggaaggggaacattacacaccagggcctgttgtggggtgggaggaggggaaagggatagcattaggagatatacctaatgttaaatgacgggttaatgggtgcagcacaccaacatggcacatgtatacgtatgtaactaacctgcacattgcctgcatgtaccctaaaacttaaagtctaataaaaaataaataaataaaaccccatggtgaatttctattatttttgtgttaccttggcatctttttaatcttccttgaacataccaaattttttcttgaaaaagattaagttctctctctctctctttgctttgagatgtaaatgtgctatgtgttttctctaaaactcagtaaagccttcctcaggtaagcgttaacctttaccatttacaagaaagcaatttgaatccaactatcttttaaaatggtgggttttaccgatctcatgcctaaagccctaaaatcaaaattctaaaatctttttgtctctctctatctttatatgaacatacataagttatatgttttatcacatacatgtatatgtcacacatttatatactgttgacacatagtatcaaattaatgtaaaaataaatgagtactcagaaattaagtgaataagcccaaatgcttttctatacatgcgattttagtaaactttggtgaatatagttttaaaattgttggtaaaataaagtaagaatgtcttcataatttaatttatacgtttttgcctatgtctgttggcaggcaggtttatattgtctttactagatgttttaaggtcagcaaacacttgtttccatatatatacattttcttaatttgtctgtgagcttatgtctttatatttgaagctttaaattctgagttctagataagtgaccatagtaagaactggggacaaaacccatcccatcctccagctgtgccttttagccatgctgggagagatgagattatccaggcattttcttcatagctctgttctttgtcttgggctttgcatctggtacatagttagaacggtttactccctagttttttttctactgaaaataaggctgtttaagtctgtttttacattgctacagacaaatacatgaacccgaataatttataaagaaaaaaggttgaatggtctcatgattcagcaggttgtagagtaagcatgattctgacatctgctcagcttttgaggaggcctcagaaaacttacaatcacggagaaagccaatggtggaggaagacatcttatataatgggagctggaggaagagaacaagggttgcacactggtaaacaaccagataaaactcactgttgctataacagcaccaaggaaaatggtattaaaatatgagaaagcacctccatgatccaatcacatccaaccaggctccacctccaactttggagattacaatttgacatgagatttgggtggggataaaggtgcaaaaaaatattattctccccatcgtccctcccaaatctcatgtctttctcacattgaataatataagaatggcttcccaacagtctctagagtcttaactcattccagcattaactcaaaagtccgaaatagcaagtttcatctgagacaaggcaagttccctttacctatgagcctgtaaattcaaacacaagttagttactttcaagacacaatggaagtataggcattgggtaaatactcccattccaaagggaagaaataggccaaaggaaataggatacaggtcccatgaaagtctgaaaccttgcagcacagtctttaaaacttaaagctccaaaataatctcctttgaccccatatctcatattcagggcacactgatgtaaggcttaggcttccaaggttctgggcatcacaggaacattccaagagagtcacaaaagaatttgtagtgaggcttttgatgctaaagagcatattagaccgagtaagtcactgaagaaaaaaaagtcagaggagaagatgggtgagggtgacagaaatggaatggtgaaaggaaagttctgataaaaatgtttacctgctggacatggtggctcatgcctgtaatcccagcactttgggaggccgaggtgtgcagatcatgaggtcaggagtttgagaccagcctgaccaacatggtgaaaccccatctctactaaaaatacaaaaattagccaggcatggtggcatggacctgtaatcccagctactcaggaggctgaaggcaggagaatcacttgaacttgggatgcggaggttgcagtgagctgaaatcgcagcattgcactccagcctgggtgacacagtgagtctccatcacaaaaagaaaaaaaaactttacccaagggctcatctggtaccttgctctgtgactaatatcttacacattttgatttactcttccactttcattttctgatgcgcaaagggtcacccttctgctgaagatgagaaaagaggctgagggagctcaaatgagtggtctagagtcatccagctacttcatagagcttgtgtgtttcaccttgacatttgtgcacagacagaaaagtgagacaaagaaggaaggcaaagcaagtttttgttgtgggtgacatttatgaaagttacctgtgttggcagaataacggactcctaaaatgtttgcaacctagctctagaacctgtgcatttacttttctttgtaaaaacacggtgcaggggtgataaaattaaaatcgtaagatgtggacgttgttctagattatctgggtgggcccattgtaatcagaagtgtccttgtaagtgacaaagaaaagcaggggcatcagtctgagaatgatgagcctgtgaaactccactggccaatgctgggtgtgagcatgcatcaaaagacaaaattacaactaatgtagttatagattttattttttgtttattatttgaggcagctcttactctacaaatatagtgatagcacttcctgggctatacaataacaaaacagtgggttttgtcaagtgggaactggtaaacaaagccatataaataaataaatcagttaacattagggtacttcaggtcgcttttctgtaaaagttaaagcagaggaaacttttattatgctgtctcaggtagagtggaatctcctgttttcaacaaaaaacaaaggtctgttctggtatctctttgcttcattaaaatttcagttgtagactgtagcatttagcatgagtggttctattttggagtctctaggctctcacttaggtgggagtgtgaccaaaatttaaagcattggcattcatctcagtaaccatcatattgggcttccatcgtttataggtttatgatgtcttcctgatcacacatttctttgagtttttgtcatttcagccaaagagagaccctttggtatttgtagatggctgcacacaaaactttttaaaaacttttgtagaattcaccacaccaaaatgtagaattaaaaaacctgtagaatttatcacaccagagatgctactagtatgactattggaaggataacaccaaaagtttggagtatgcactttaggcaagatgcaaaccaactaaaatagaatagatcaaagaatgagccagaagagtctagcaattttaaccaagtagtatgtttggtaacttctgtgattgagtcattattatactcaatatatttgtttatgtgcaacagttggtgtcagaatctgcacaggctcctccctgttcagctggtagggaacaattttattatgtagcattcgacggctcattaaattaaaacagggaatgagaacaatgagtctgaaaatgtaactttaaaagcgccactgtacatttgaacaaacaattgtgttaaatatgctgctaatgtcagccgttgggtggactaaatgatatcttatgtaaaaatttgagggtgacatgatatatctgtcactctattacgctgctctcagaaactacttcatgtgaaattctgatgataccatcatcctgccaagtgaaagaggcaggcataagcatggacaaattaagaggggtaagagcctgattttgatgtggaaacgtgttctgacaacttgagaaaagcttttcacagtgtgaagttgtcaacttcttatcctggttttcaacttgagtgtctgtagttatggtgtcaaacatattggtgagctctgagtgactcatacttcagatacgagggttttcccgtgaaatttaccttgagctttccacctccagcttataaggcttcaggaacagagcagattttattcttactgattcaataagagaaaactggatgggaggaactagaagaattcagggtctagtccagactaccggtgaaaaataaaaactcaaaaacaataaacagagcagcaatttcatagcaggtatactacactttttattttcaacattattttgctctctataggcatatctatttttaccaaagataaacccagtaggacaaatttgtttacaaagtaggtttagtcttaccaagctttgccaggattctttacataagtgcatcaagagtagcaatggaccacagaggctcttcctaaagtttgcttcgctagaaatttttataagtagtctcagattaaatttttacaaacctctggagacgaggaagccaaatgtaggccatcttcagactttgcctgcagtacatatgtgtccattctatgtatattctcaaatataacttctcagtcaaaccttggtaatataaccaatgttttgaaacgtgtccttttataaagagagaagactcttactaaacttgtgcaaataactgtattagcataaacatatgaatactcatgaatagtttcccaatcctgggacagttaggtaaagagcaaaaataaatgggcttcaattattgcttccaaaagtatactttaccaaattgctttagatatagctagcttaaaagaaggaaaattccataaatctggaaaaaatcatttaaagaatcagcaaattttcaaataaaaattataaaaacattatccactttatcatttatttcaaggaaattatttttgttctgcttggtctaggttggcatatttcatgaaggcatcaacctgtttgttaaagttttggaagtctatagacagttcagtgatataatcttgaactgctcagaaacttgtatgcaagagtacttgtcagcatcttttccataaatcttttgaaatagaagcaattttgaactgtagctgattgcagatgctttcaggaagaatcaaaacaactatctgtgaatgaccatcatgtaaaatgactattgttaaaactctgataaagagcccgcatcgccaagtcaatcctaagccaaaagaacaaagctggaggtatcacactacctgacttcaaactatactacaaggctacagtaaccaaaacagcatggtactggtaccaaaacagagatatagatcaatggaacagaacagagccctcagaaataatgccgcatatctacaactatctgatctttgacaaacctgagaaaaacaagcaatggggaaaggattccctatttaataaatggtgctgggaaaactggctagccatatgtagaaagctgaaactggatcccttccttacaccttatacaaaaatcaattcaagatggattaaagatttaaacgttagacctaaaaccataaaaaccctagaagaaaacctaggcattaccattcaggacataggcgtgggcaaggacttcatgtccaaaacaccaaaagcaatggcaacaaaagccaaaattgacaaatgggatctaattaaactaaagagcttctgcacagcaaaagaaactaccatcagagtgaacaggcaacctacaacatgggagaaaattttcgcaacctactcatctgacaaagggctgatatccagaatctacaatgaactcaaacaaatttacaagaaaaaaacaaacaaccccatcaaaaagtgggcgaaggacatgaacagacacttctcaaaagaagacatttatgcagccaaaaaacacatgaagaaatgctcatcatcactggccatcagagaaatgcaaatcaaaaccactatgagatatcatctcacaccagttagaatggcaatcattaaaaagtcaggaaacaacaggtgctggagaggatgtggagaaataggaacacttttacactgttggtgggactgtaaactagttcaaccactgtggaagtcagtgtggcgattcctcagggatctagaactagaaataccatttgacccagccatcccattactgggtatatacccaaaggactataaatcatgctgctataaagacacatgcacacgtatgtttattgcagcactattcacaatagcaaagacttggaaccaacccaaatgtccaacaatgatagactggattaagaaaatgtggcacatatacaccatggaatactatgcagccataaaaaatgatgagttcatatcctttgtagggacatggatgaaattggaaaccatcattctcagtaaactatcgcaagaacaaaaaaccaaacaccgcatattctcactcataggtgggaattgaacaatgagatcacatggacacaggaaggggaatatcacactctggggactgtggtggggtcgggggaggggggagggatagcattgggagatatacctaatgctagatgacacattagtgggtgcagcgcaccagcatgtcacatgtatacatatgtaactaacctgcacatggtgcacatgtaccctaaaacttagagtataataaaaaaaataaaaataaaaaaaaaaagatgaaaaaaaaaaaaaaaaaaaaaaactctgataagagtttggtataataaagagagtaactccagccagtactccagtcatgatgctggcagtggccccaactgagagaccaaaagaactttcttgtcctgaagcagctgtcatggaaaaaaaaagaggagaaggaataaataataaagacagcaagggttttagccaattattttttgagatagggtctcactctgttgcctaggctggagtgcagtggtgcaatctcagctcactgcaacctgtgcctcccagtctcaagcagtcctcccacctcgctctcctgagtagttgggactataggcacacaccaccacacatgcttaatttttgtattttttgtagagatggggttttaccatgttgttgagggtggttttgaactcctggactcaagttatccacccgccttggcttcccaaagtgcagggattacaggtatgagccaccgctcctcccggtttcatgctttttataataagaatcaactctttatgtaataataaataaataaacagaaattatttgctttagatgtagcatatgtagatttagattgtccagagtcaggagctaagcctcatatttttttttttttgttttagctcagtgtagagtgcattgaaggtgttgtaaaaataattccatatagtaagccaactttaaaccctgctcacagccagatctgccaagtatgagccaggtaaaattaccaaaaacggtggttctgactgactccttaacaataacgtggcttacaaacaaagactgatatgaaatagttgatccaacccaaacactttgctcatttcccaaaattttctatacaaatatatacaacttaccacaacataaagatcataatgaaagatttgccttttattcctttaaatgaccatatgttcagatctgatgtactgacagcaataattctccattaagcagaaaactaataaaatttgaaaaatagtgattttatatttagatgatactcagatcttctgctacatatgtggaaaatggaattattgctagaaacattgtttaaagattagggtatgaaaggagtattaggaagtcaggtggttctttccttaggaagcagcttatctggattcattcaaagagctttaggtgagtttgaggtctttctgcaaaatgtaaattgctatctgagaaaccatatatagtccaatgatgaaagaatgcaaagccttagaagcaccggagacaattccagtatcttccctaaagttctgacaaaaaggaaaataactatcaaattattcaactcgaatgcttattatgtatgtataagtcagtcgtcagatgaagagaggctggaaatatgacttctacccctagggaactcacagtcttgtgggggccactaggggtggtggtgtgacctgcctggagcagggctaagtatggacttgtgagtcaagggctatcaaaacctaagtgaactgatggccgttcagagaaggtagagttccattccacagtttgcaagaaggacaatttcatggaggaggccacgttggactagacctttaaaagttggtagaatttaaaagcaaggatatggaagcaggaagagtgaaagtgagcagaggtacaggagtgaggcaagggtgagcagtgttaattttttaatggtggtattataaaacacacatcaaaatttgccatattattattattattattttggagacagtgtctggctctgttgcccaggctggagtgcagtagctcaatcatggctcactgtagcctccacctcctgggctcaagcaatcctcgtacctcagcctcctgagtagctgggaccacaaacatataccaccacgcccaactaatttttatatttttgggagtgacaagatcttcctatgttgcccaggctggtctcgaactcctggactcaaataatcctcctgccttaaccccaaagtgctgggactacaggtatgagccactgcacctgaccccatcttaaaaatttttaagtgcacagttgagaaatacatttgcattgtgcaaccatcagcgccacccatattcagagagtatttttcatcttgtaacagggaaaattcatatccatgaaacactaactcctcattcttcctcctccccaccccaggtaacaactatttcagtgtctctatgattttgactgctctagggacttacataaatgagatcatacactgtgtatctttttgtgactggcttatttcacttagcataatgtcctcaaggttcatccatgttgtaatatatgtgagaatttttttccttttgaaggctgaataatatttcattgtatggatagaccacattttgtttatccattcatctatccatggacacttgggttgccttcactttttggctactgtaaatagtgctgctataaacatggaggtaccaatatctgttggggtctctgttttcaattattttgagtttatgcccaggagtggaatggccaagtcatgcagtatctctaattttagttttctgaggaaccaccataatgtttttcacagtggctgcaccattttaattcttatgaatagggcacaagggttccaatttttccacagtctcattaacacttattattttctgggatttttgctttgcgtttgagagtagccatttaaattggcataaggtataatttcattgtggtttacattttcatttccttaatgattagtgatattgatcaatattttctatgcttgctggccatttgtatatcttctttggagaaatgtttatgcaggtcatctgcttatttttttaaattgggttgattttttttttttgctgttgtttaggtagagaaagcaatctttggataccagtgatgtttcactaattctgggccattgatttcacaagttgtatgaggtattagtatgtgagtttggtttcaatcatggctgaggttgaatgccttttccaaaattcagtgtgaatttcaccagaagccacaaagggtccaggagcaagaacatggtgtgactgctctgtgctaaagaatttcagcctgatgacagtgagcaggctacacatgagactgacacaagaacaggtggagagggagactttccactggaagaaggtgattctaacatgcagaatcaccttcaaggagcaagtaagcagaaaaatagacaatggcacagtggccaggcaagaagacactaggtccagaatctgaggttcaaatcctggctctgtgagataaaaacatgccttggtttccccatgctactgaaacaccaggggttgggtctaggtcccattgctcactgcacagaaagccaaccactgagacaatgagcattgccagggaagaaggctttatttgggtgctgcagccaaggaggtgggagatcagtcttaaattcatctctccagcccactcaaattggagggtttatatagctgggaagggaggtaactactagcagggaaaacagcaattaaggaggggtaaggaagcaatcatgataaatgaggagtctggtgtctcattgtctgatagtgatgtggtgagtttcagtctcttgcctgaaggtcggtttcctaactcagatgactgacaaatgttaagtttcaagttataagaccggatgggtcaatttctatgtttattcaaaaaccctgtaaatatcagttctatgtggaacttgagctggtttccccccagttatcacagttagggttaaatgatgcaatataagtaaaacaccagcagtttctgacacacacacacagagtgtgtgtcatttttttattacactttttattacacttttcattctgggatacatttgcagaacctgcaggtttgttacataggtatacaagtgccatggtgttttgctgcacccattaacccatcatgtacattaggtatttctcctaatgctgtccctcccctagtcccccacccctcaacaggccccagtgtgtgatgttcccctccctgtgcccatgtgttctcattgttcaactcccacttatgagtgagaacatgcagtgtttggttttctgttcctgtgttagtttgctgagaatgatggtttccagcttcattcatgtccctgcaaaggacatgaactcatccttttttatggctgcattgaattccatggtgtatatgtaccacattttctttattcagtctatcattgataggcatttgggttggttccaagtctttgctattgtgaatagtgctgcaataaacatatgtgtgtgtgtctttatagtagaatgatctataatctttgggtatatacccagtaatgggatcactgggtcaaatgatatttcttgttctagatccttgaggaatcgccacactgtctttcacaatggttgaattaatttacattcccaccaacagtgtaaaagcattcctatttctccacatcatctccagcatctgttgtttcctgaccttttaatgttcaccattctaactagcatgagacggtatgtcattgtggttttcatttgcatttctctaatgaccagtgatgatgagcttttttttgtatgtttgttggtcacaaaaatgtcctattttgagaagtgtctgttcatgtgcttcacccactttttgatgggcttttttttttcttgtaaatttgtttaagtttcttgtagattttggatattagccttttgtcagatggatagattaaaccttgcaagctgaaactcaatgacttatgtaaacttctggagaaatcatagcaacttatatataaacaacctttgtggctgctgatgtgtggactatacaaaaggtacacatgaacactggattcagactgcaattcagagaaatgtgtcagattgccattgcaattggaagatacttcacaaactctggaaaacctagtctatagggttagaacgatgtttgccaaacgaattgctctaattgaagcagcagttgtgtgactttaataaggttccaggattatactgtcccttttttgctgtgacttccctttgcccttttctgatttgtcttcatccccttttccatgcatgacttcttaagaatgagccttcctagtgatgtaggatcagatgaaacttacagtcacaaagtcatgtcttctacaatgctttctctgaaagcttttgaagaattggggggccaggtgtgctggcagaggcctgtaatcccagcactttgagactctaaggcaggaggatcacttgaaaccaggagtttaagaccagcctgagcaagaaagggagaccacgtctctacaaaacataaaataaatcaaattagccaggtgcagttgtgcatgcctatagtctcagatacttgggaggctaaggctggaggaccgcttcagcccaggagttcaaggctgtagtgagtacactccagtctgcgtgagtgagcaaggttgtgtctctaaaagaaaaaaaaaaaaaggaaaggaaaagaacggggtaaacaggaaagccaaagatctcgggcatctccagatgattgtctgaacaaattgttttttcttggcttcaaaacctttcaagatgtatatttctttgtaaaagaaagacatgccaattgtaactttaagtgagcaatcaaaatctaggtcctaaaactgaagtattttaactctcattctgataatatttattttctgaggcaaagaagaaagacaacgttagatcaattgtttctctgcccactccatctcttccaacctgccttctcccctttaatcaaatgtataaatactaagcctcctgaaacgtcttcagagaaaacacaagccacagaggttttttgcaactcatatattcccagggtgcactgtcaggctctggctcaataaaactcaattggtcaagacccttgcctcagtcaatcattctggataaccaccatgagtcctgcaaagcccttcagtaatctattgcctgcttaggtgatgtgtacctagatgagtcagatcttcatgagtccaacactcgtcttccttttctgtctttcccaaccctaccactcagtgctgtgtgctctgatctgaccccagctcccaggttgtttgtattggtctaagaaagcaagaccaggaggggcaggttgagaaggaagtaagaggccaactgccagggaaagtggcaggtagggctgtcattgctcaacgccacacacactgggtccattttgtgaaattttctggattcataatcttttccctgtgtgtctatcaagaatctcaccctcctccaactttcttctcattacactttctgtttctagtgcactcgtttatgtccagagaatggccatgcaaatagttgacaatagaataaaaaatgacgatttgtcagacttagaagctggcctttcttttttccaaaagagattgaggtttctaaaagctggcttttatgcagggctgtgcagttgtgagtgtagttttagggaacaggtgcataagtgaagggtgagacagaaaacaaaattctggctatttgtcaaatcctgaaagtgaatgggacaaaaatcatttttgaaggaggatgtcattcaggagaccttgtaaatcttagagtgtcctcttaccagatgaagtggaggatgaggttgaattatggagttaggtgacagtgggtacatacttctctgcctcagttttttttttaatctgtaaaaatggggattgtggtacttgggattttttggtgaggactgtagtttcctggaaagctctcaggatagtacctggtacatagtgagtgctgcatcagtgtgagctattataattatgggaatagacaaaggtgccaccctggccatccagagtggggaggtattttccagtcagggtccaggcaggccagctgtagatgaagctgattagtggggaagcttaacttccaggagtggaagaatttaggaggagtaaacagaatgcacaacattctgcaaacattcctttacccaacagtaggaatactcagagttggcgtggattccgtggcaatcattatctcctgggaatctaagaatgtgtcctagagtcaaatggctttgatgtaagccaaacccagaaatgggcttcagggctgccttgcacatagcattcattcatcttgaaaaaggaaagcattcatcttgctaaaggaatcccctcttctggcccaggccattatttttgtttttgtactctcctaatttttaaggtgtaaggagaaagaccgaagaataaaataatggagtacatgtatgaaatgacagggtagaattgagactgctacatgtaagttaagagaaattgtgtataaattttgtgtgagcataagaaggatttcttgttgcaaacagacctctccatataaataatacccattgcctttagtggatagcagaccgcatcagaagaacattccaacagagtcatgagacaatgggtagtgtggcttctttaattggcaggttagactgagtaagttactgaagagaaaggagttgaaggagaagatgggtgagggcaagaaaaatgggaaggtgaaaggaaaggactgaaaggaatgtttaccaagggctcatcaggtaccaggctctgtgactaatgtcttacacatgttaatttactcttccactgtcattttctgatgcagtaagagtcagccttatactgcagatgaggaaagaggctgagggaggtcaaatgagtggcccagggtcatccagccacttcatagcagagctagtgtgcttcactgtggtttgtgcagacagaaaagtgagacgtggaaggaaggcaaaacatttttgttgtgggtgatgtttatgaaagtgacccatatgaggcagaataatggcctcttaaaaatgtccacatccaggccgggtgcaggggcacatgcctgtaatcctagcactttgggaggctgatacgggtggatcacaaggtcaggagttcgagaccatcctggccaacatggtgaaaccacatttctactaaaaatgcaaaaattagctgggcgtggcggtgggcaactgtaatgccagctacttgggaggctgaggcaggagaatcatttgaacctgggaggcggagattgcagtgagcccagattgtgccactgcactccagctggggcaacatgagtgaaactgtctcaaaaaaaaaaaaaaaaatccacatcctaactcttggaacacatgcatttacttttcttggcaaaaacactgttcaaaggtgatgaagttgagtatcttgagaaggaaagcttattctgacttatctgggtggctcccagtgtcatcataagggtccttgtaagtgaaagagaaaggcaggagggtcagggtgagaatgatgcagcctgagagactccactggccattacttcctgtgaacatgtgtgataagacaaaattacaactaatttagttattgatgtaattggcttttatttttgatttatgatttggggcagctctccctctacagatgcttcagcatcccaagtagctgggactatattgcgggatctggccagcagcttgcaatgcaacagggctctttctttgttcccaggcagatcggcaggttgagaaataaaagacacacacaagatagtgaaaactgggtccagaggggtcactgccttctggtcctgcgatgctaccaatgcactggatataccagcatttattattaagtttagtgagagtgttggtaggttagtgagggatttaaggtcatttgtaagctgtccacaagggtcgcattccattcccagagctatggacatctgcttttctgggataggaatcttggttatgtgaaacctccctgactgcatgtccattcataggctctctgcaggcggaagcacatcacatgctgttggctcattctggcagcccaacctggcatttgtctttacacaatcctgtatgcaattttgtatttacaataatcaggagcatttcatcttttattccatagcaatagtttcagggggtctccctacatctcccccttttctctgatttcaatgaaccatagcaatcataggttggcactgatcacgattggattgaagaatattttttccaattttacacacgaacagtaaaccaatagcacaaattatacacagaacaaaattaacgatagtggatcctcccaaagattttacctattgaaaggggttgagattagataacccctcagagatactgtctaaaacttcagcactaggtaaagcagataagtgtgcttgagaggcttcaaaaatctgttctttcagcttgtttatgtctaaacttaaattatcttcacttccttgtaaatggcattttactgattcccaattgtgaaaagactctttatattggaacggagttatacaaaaatcagaagtattccaatcacgttgcatttgtaatctgtgttctaaactcataattctatctcccatccatataacagaagcacatcacgcgctgtaggctcattctggcagcccaacctggcattgtctttacacaatcctgcatgcaattttgtatttacaataatcaggagcatttcatcttttattctgtagcaatagtttcagggggtctccctacaggactacaggtgcgcgccaccatgccctgctaatttttgtatttttagtagagacagggtttcaccatattgaccaggctgatctcaaactcctgaccttgtgatctgcctgccttgtcctcccaaaatgctgggattacagatgtgagccacagcgcccagcccataaatcacacatttctttgagtttttgtaattccagcccaagagaaaccatttgatatttgaagaatggctgcacaccaataaaaacatctgtagattgcaccacacgagggagactaccagtatgactatcaggaggaaaatatcaagagtttggaatatgcaccttaggcaagatgcaaaccaactgcaataggatagatcaaggaagaagccagaagagtctagtcattttaaccaggcagcacatttcatgatttttacagctgagtctctataaaacccgatgtatttatccatgtgcaacaagaagggtgagaaactgcacaggctcccccctgttcagctgatagagagcaattctattatctagcattgcatgtgtatgttaaattaaaacagggagtgagaataggcaagtatagaagtggaagcctaaaaaaatctccatacatttgaggaaaaagttgtgttacaggtgcagctaacgtcagcctttgggtggattaaaggatctctcggtatgtaaaaatgggtgggctgggtgtggtggctcacgcctgtaatcgcagcactttgggaggctgaggcgtgcggataacctgaggtcggagttcaagaccagcctgaccaacatggagaaaccctgtctctactgaaaatacaaaattagctgggcgtggtggtgcatgcctgtaatcccagctacttgggaggctgaagcaggagaagcacttgaacccaggaggcagaggttgccgtgagccaggattgtgccgttgcactccagcatgggcaacaagagcgaaactccatcttataaaaaaaaaaaaaagtatggttgacatgatatacctgacactgttaacttactctcagaagctacttcttgtgaaatcctaagtacagcattattctgggaagcaaaggagacaggcataagcaaggacaaattaagagaggtaagagtctcatcatgattgatagtcttgttctgacatcttgagaaaagctgtccacagtgtaaagtcatcaacttgtcgtggtttgcagtttgagtgtctctaagttatggtgttgaacatgtggtgagctcttagtggcccccacctcagacacgagggttttcccatgaaatttacattgagttgtccacctccaccttatatggcttcaggaacagagccactcttgttcttaatgatttcattggagaaaattgaattggaagaactaaaagaattcagggtccagtccagtctaccagtggattataaatactcaaagataatgaacagtggttcaatctggtaacaggtgtactacagtttttcttttcaacatagtttttctctctataggagtctctatttttaccaaagataattccagtaggatgaatttgtttgcaaatttggttgagtctcaccgaacttgcccagattttttacctaagtgcggcaagagtagcaatggactgtagaggccatttttaaactttgctttgctagaagtttttaataagaatctcagattaaacttccaaaaacctcttgagactaggaagccaaaccaaggcccacttcagactttgcctgcattccctatgggtttattctatgtatattctcaaatataacatcccagtcaaagccttgataatataatcaatgttttcaaatgtgtcctgttataaagagagcagattcttactgaacttgtgcaaatagctttattaccataaacatatgaatactcatgaatagattcccaattctggggcactcagatagagagcaaaaggaaatgtttcaatttttgtttacaaaagtatactttaccaattgctcaagaaaaaatgttcataaatctggagaatgaaacattccaagaatcagcacattttcaaatagaaaattatgaaatcattatccttttgattatttagtccaataacattgagtatttttcttctttgtcttgaatttcatgaaggtatcagcctgttcattaaaattttgaaagttcttagtccagtggtatgatcttgaagttatcaggagcttgtattcaagagtccttgtaagagacctttccataaatctccttgaagaaaaagcaattttggactgtaggtgattgtaagtagtttgaggaagaatcaaagcaactgtctgggaatgacagagatttaaactgactatggttaaaaatctaatgagaatttattatggtaaagacacagctcacatagaaatctagttacttctgtggcatatgacactatgataacatatttgattttcagaaatttcatataatttttagaatactcattaaaaaaatttttttttcagatggagtctcactctgtcacccagactggagtgcagtggtgccatctgagttcactgcaagctccgcctccgcggttcatgccattctcctgcctcagcctcctgagtagctgggactacaggtgcctgccaccacacccggctaattttgtttttgcatttttagtagagatggggtttcaccgtgttaaccaggatggtctcgatctcctgacctcgtgatctacccacctcggcctcccaaactcctgggattgcaggcgtgagccatcgcgctcagcctagaatactcatattattaacattcccataaatattatttagagaaggtttagcatcacttatcccttatttgaaaatgctttctataaatttaatatataaaataaggtggcttttccgttcagcttctgtttctcaagaggattactgagttcttggtgtagcccattcataaatagggccaaaaatgtatagtcttatgtatgttgaaaaaggtccttaggtaattccagtacttttagctgaaaatcattgatttagttttaagttctacctattgcaacaggagttctccatccttgttacgtgttagtagtgtcagggaagacttaaaaattaccagtgcctgggtccctctccagacctttgaactggaactaatgggtggggcttgagcatccacttttagaaatgttttccagtgattccaatgtgtagctctatttcccatcagatttctctgatttcttgtggcattcaattttttctattttggtatcatgattattttcaggtctcatttcctgtcttaggctttatgtctcctggggtagggaccttgccttcttcatttctgtatgttttttgaacacatgaactgatcatcaggaaaagatctcaaccacacataggttgtgttctgagtctcaggttcacatgttaatcctaaagtctttgttctccacgaggtcacatgttgcttgtgatgaagggtgtggttaagtctgcagtgcagatggttgaagggatttcactctgtttttagacatagcattggaactaagaattttatgtctatatgggtgaaggggcagggatgtgtaggaagacagttctaattaggatggaggatttatactaggaagtagaggtaaaggaagtgagaagccttagtaaatagaagaaatgtgaacttatcaaataggctagagtagacccctgcagattcttgattaaatcaattaaccagattttagaaaggtaatgaggcaatcatatgcaaggaagatttcaaagtctggagacaagaagtcaagcaatactttgagaagtggttgagctttatgggaatggagagaattacactattgagagatgttaaaaataatgaagagggtttcaccatgtgaaattgtgtttctcatttgaatctgagaaacaaatgagcagaggctggagataattatgtctaaaagacagtggggtacagggagcataaaggccagggagaaagggaactgcaggaattagtgctgagaagcaggagtttagtggaggaaggaggagatgcagtcccagatacaggcaaataagtcttttccctctcccaagcatggcagtcagctctgcaggaaccaggataagagaaaaggccatcatacctgccagtcttcctgaaatacagaaatgacatcacagctgctatgttggattaaggagaggaagaagtcctattcttgtagaagctgtcatggaaagaaaagtaaagaaggaatgaaggtgatgttattttacatgggggagcatcaggaacaagcatgtaacatgaggtactctataattgtttcttcaaggaccacattatttctcttggaatattgatgggagatgattatattcttgcagttttttttccctctcaccatgtgtctcggttggtgatcagtcctctgtcaattctctactgcactcagatattttggaaggctttcagatgtgagaaaggctgattgctattttctatgtcattagaacttgccacattttcaccttttcatggttgcatctttttctcggtgtttctgttgtggcagtcatgaatgagactctgtcaggtctccatggcagggacctgattggcagaaggcccaggtcagtgcatttcaaattcaccacctcttgtgcacagaaagcttctttcctacaggctcccagcaagggtgtgaaagcaagcctagttctccgaggctctctttaactctaatgggtgactggttggaggattcctcatcagccttgcaaaaactcttagaactgcattggtacctaaaacttctttctctttgtttttcataggaatcagctctgcatagtggtctgtgggttctcccatactaccttcatgcctgccccacattccctcacagatgtcttccctgataaattatcttgtatgtctaatcccatcttggatgcatctcagttggtaaatactaacataccaggcttgattctttgcccttagctttttttctttctctcccacaagcagtcagtaaccatgtcctagtgttttatgtgttacctctttttccatatatatatatatggaaaaaggtagatactgttgaggggcacttgctatgtgccaggccctgtgctaaatacttccctgtatctcatttaatccacacaataaccctgtcaggtagacattatttccattttggcaatgaaaagacagaagcttagcgtggtgtaaaaactttcctggtgtcatatggctagtgacagggggatctgagatttcattctaggactatttgacctcaaggttgatgatgatgatagtaatatagtagctgacattggttcctctgtgtgtggcatcttgtttcattgactgcattaaatctttaaaagaatggtatgaagaaagcactgtcattgcaatattcaggtaaggaatcagaggttcagagaagttgagtcttgtgcaagaaatttataactgtaaactcttacattaaaaaagaagaaagatctcagatcaacaacctactttaatacttcaggatatgaaagaagaacaaactaaacccaagcacagtgaatgagggaaataataaggattagagtggacataaataaaatggagaacggaaacagaatagaggaaattactgaaaccaaaagttgattcttcaaaataaaatcaacaaaattgacaaccattaactagattgactaagaaaaaaagagaaaagtttaaaattcctaaaatcagaaatgaaaatggactctgagcatggtgggtcatgttttaatcctagcactttgggaggtcacagcagaaggatttcttgagaccaggtgtttggaccagcataggtaacctggggagacgctgtgtgtacaaaaaaataaaaaaccaattagctgggcatgttgacatgcacctgtagtcctagcatcttgagaggctgaagaaggagaattgcttgagcccaggaggttgaggctgcagtgagccataatcacacaactgtattccatcctgggctggcctacagagtgacagcctgtctctctcttttcaacaaaaaaaaaaaaaagaaagaaagaaagaaagaaagaaaaatgaagcgattactaccaattctaataaaataatgattatgaaagtactataaataattgtatgccaataaattggataacctagatgaaatagacaaactcctagaaacacacaaaaatatgaataaaactataatcactaataagattgaatcaataaaagcatttgatgaaattccatattttttcataagaaaaacattgtaagaatggaaggaaaccacttcaacataaaggcaatatgtgaaaaacccaatggtaacatcatacttaacggagaaagactgaaagctttccctgtatgagcaggaataagacaaggatgcccacttttgacacttttattcaacatagtgttgaaaggtctagtcagaaaaattaggcaagaatttaaaaaaagacattcaaattggaaggaaggagtaaaattatttctgtttatagataacttgaacttatatgtagaaaatcctaaaggtggaacaaacctattagaattaataaataaattcagtaacgttgcacaatagaaaatcagcattcaaacgtcagttgtatttcaatacactaaccatgaacagtctgaagggaaattaggaaaaaaatttcaatttatattaacatcaaaaagaataaaatatttaggaataagtttaaccaaagaggtgaaatgattatacctgaaatctacaaaatatggctgaaagaaatgaaagatgacatcaataaattgaaggacattttgttttcatgaattggaagactcaatattgttaggaggacagtgctacccaaagtgagctgcggattcaatacaattcctatcaatcagaatctcagtgacatttttgcagaaaaacaaaaatctgtcctaaaatttatattgcatctcatgactaaatagacacagagctttgaggaggaagaatgaagctggaggactcacactttctgatttcagcatttactacaaagccccagtaatcaatacagtgtggtactggcataaaggaggacatagaaattaatgaagtataatagcccagaaagaaattcttgcatatatggccaaatgattttcatcgagtgtgccaagatcattcaatggggaagggacagtgttctcaccaaatgatattgggaaagctggatattcaagggcaagaaaactagaacctttacataacaccatgtacaaaaatcaacccataatagatcaaagatctaaatgtaagagcaaaaactgtacaactcttagaagaaaagcttcatgatgctggatttcacaatgatttcctggttgtaacaacaaaagcataggcaacaaataaaacggataaatcggacttcataaaaatcaaaaccttttacatatcgaagaacattatcaagaaagtaaaaaggcaacccatgaaatgataaaaatatttgcaaattatatgtgtgataagaaattaatttccagaatacatgaaaagctacaagtcaacaacagcaaacatccgaaaacccaattaaaaaatgaacaaaagattaaaatggagttttctccaaggaggttacacaaatatccagtaagcccatgcaaagttcctcagcatcatgaatacttagagatgtgcaaatcaaaaccacaatgttacaccacctcacacactttaggatggctttgataaacaacaacaatgacagcaacacaaaacaacaggtgttttcaagcagatggaaaaattggagctctagtgcattgctgatgggaatgggaaatgttatagccactgtaaaaattggtgtgctgtttctcaaaaaattaaacaataaattaccgtttgatccagcaattccacttctggacatactccccatagaattgaaagaaatttgaacaaatatttgtgcactgatgttcagagaagcattactcacactagcgaaaaaatggaaacaaccaaaaagtccattgaaagataagtgggtaggcaaatgaggtgtgtctatacgttgaaatgttattcaaccttaacaaggaataaaattccaatacatcgtgcaaaatggatgaaccttgaagatattatgctaactgaaataagccagacacaaaaggataattattatataattccatttataaaagatagttagaatagccagttacatagagacagaaattagaatggtgggtgctaagggttcgagggagaaggagtgagagttactgtttattgggtacagaggtttaatatggtaagaggaaaaagttctggaaatggatagtgtgatggttacacaacactaaattgcacacttagaaatagctaatggtaagccttatattagatatatataaagtgtctggtagtcttaccctctctataattacacactttttggcactgcccttttcctgccatgcagagctccaggggtgaatctccctatttctctagctctgcatcagtcacagtcctccatgctgtgtcccacgtactgtgcccacagcttcatacaaccgctgacttcagagccaggaccaggcttaggagtctgccctgaggctccttctcttctcatttccctgcagcctggcccgggggaggcttggcttcaactggcagctccatttagcgaaattcaggacagtccacaaggggtctttctccacacatgctggtcccaccccaggtggagtcaaacagggccagtcaccagaggagcccagagcagagcaggaagcagagtctgagctgctcctccctcacccaaggggcttcctcctctcatttgggggaaaagtgtgagcttgtttcaaagcctcagatgttccttgtagctcatggaataggtacaagaaaaaaaagacgtggcagaaggggatgtgttagtgacatccagaagcaacttgatcttgaggacactccttcttgtccctctgtgaagcctcttctaccacatagggctcagggctgataatgacccctccctacctttctcaggcgagacacaaggtcagccatgagaaaacagaaaaacaaggagaagagagtttgtagagacaaattgggagggttcaggaggagaatttgggatttgcttttgcccatgggacacaggctgggaataaaaatgttttcctgactcttctctgaaagccagatagactccacctaaaaccctactgccaaggatgctgggatccacttaccagagactttgactgtcaacgatgtggagctttcctcgccagtggctgagttacgaacagagcaaacatagagcccgctatgctttgtagtaatttgggggataaacagattttgtcctgattgctgaaacttcccattaattgtccaagaatactgtgccggtgggttagagttcgcgaagcaagacaagtagaggttatctcctgaacggtaattggtgtatgaagggtgaattctggggaggtctggaccatctggagcaaagagaataaagccacaggtgatgccatctgagggaaggggatgctcctggtctcttaaagggacacagtgaccctctgagacaagacacatcctcaagtcccagcaaaaccccctctatgttcactgagccgaaccctgaagtattcacctgtttctcccaccacaagatgtgggccccaagtctcccacgacaagaccgtccactccccttatattcttggttaaggctgtgcctacccaggttttcccagggcagggagtcatggccagcttggatgtccagaagtaaagttgtctatacttggaccggagagagactgagaggcctggcccctggtcatttggatttaagctggtggcctggcccacagaggaacaaaagatacagaggacattcagggtgactgggtcactgtggatgccaccatatcggtcccgtatttcacattcatagggtcctgtttcatttctcgtgacactgggtagaatgaggatcctgttttcaatgggtcgctttaccctgggactgaccgggaggctctgaccatttagccaccaaatgtaggtgtagctctcactcttaggttcacaggtgaaggctaatacatccttattctccctggggtttaagttgttgatggtgatttagggcttgggcagcttcgctgtgtggataacagagagaagattgtcctgtgtggcacttttgattcctccacaggcatccttcaatcagagttaccatctcccacctctcagcccacctgagtccttgaaagccaataactggtgtgtgtgtcacaagacagatgcatgatgatctaagggctcaaagactgtgaggccgcctgctctgtcttaggaaagcacagactttctgaagtgtcaattgagcagcagtgttgggtcatggacagacatgtcagtgggagtcacagccccagtacccctcccagtctctccctaatcagttgactggctggctcaccttgggttccttacctggaatgtgcaactgctgggccccttccaaattccatcctactttgcccccctagatgtgatttctctgcagcttccatttccaaggacattctagagatcagtaataatgggacttcccattgtcctgaaaccctgaagatactgagcagcctggcctgggactggatgtttcagcagaaataacacaggggagaccagagtcaagcctggaggtcagttcagtcatcaggcagtggaggcacaaggtggggcagctttttgcaggtgtttcatgatgacttacttgaaccagtgacctctaaagatagaacagagtgcaaggaatgatctagaaagagtgaaggggataggcaagagctggtggctttggagcagaagcatgttccctgtcttgggttctttaagtttcctctccttctgcagagggcaggtgaggaccatgtggatctttccagaaatacatgcggacatttgcaaaagcagaactgactggtggaaagggtgggaatgaactgctggaaatctggtcgtcatggaccatgtgtgtttgatggatatgagacaaatttggagagaagtttttcaaatattttctttcattgaacaatctactctgtgattccctgggttcgactactctagggacctcatgtaagtggattccagagtgaatatgagaagagactgctggttgccaggagctgggagtggggagaatcagaagttgttcatgggtgtgcagtttcagttatgcaaggtagggagtttctagagatctgctgtagagcttgatgcctatagttcacacagattgagtatttcttatgcataagacttaagacaaaaagtgtttcggatttctgacattttttgattctgaaatatttgtcatatacttactggtttagcatcccaaatctgaaagattcaaaatctaaaatgctccagtgagcatttcttttcagcatcagattagtaggcaaaagtgggaggtgataagccaaagatattcttgcccttttttttctctcaccacgtttctggcttggtgattagttttcggtcaattccatactggccatgctgcactcgtttattttttaaggctttgggatgtgagaaaggctgattgctattttctgtgtcatcagaactttccaccttttcatggttgcatctttttcacagtgtttctgttgtggcagtcattaataagagcctgtcaggtcagatttaggacggagttttctaattctgccaaaaatgttactgtgattctgggaggggttgcattgaatctgcaactcactttgggtagtattgtctttctaacaatattgagtcttccaatccatgaaaatgaaatgtctttccatatattgatatcgtctttaatttctttcagcaatgttttgtagttttcaaggtataatcatttgacctttttggttaaacttattccaaaatattttattccttttgatgttaatgtgaattgaatttctttccttaatttcctttcagattgttcattgttagtgtatagtctaaagaatgatctagaaagagtgaggggacaggcaaaagctggtggttttggagcagaaacatattccctgtcctggggttttgattttccctctccctttgcagagggcaggtggctcttccctgatagctagatagacttcactggaaaacatattgccaatgtttcagggatccacttaccagggactatggtcctcttgattatgagatttgttccagcagtggctgagttatggatgaaacagacatagagccctctatatgttttagtgatttgagggataaagaacacttgtgctgattgctggaacttcccatcaatcagccaagaatgctctgccagtgggtgagtgtctgtgaggcaggagagcttggggacttcccttgtatggtaataggtgtgaggaagaaatggtgggggcatccaggccatctggagcaaagagcataaagtcacaggcactattgtcagagggaagggaaaatcctggtctgtggaagggccacagtgaccctgtgagccaagccgcaacactgaactcccagccaaatccccgctgtgttcactgatctggagcctgagacattcacctgtttctcccatcacaagctgtggaccctgagtctcctatgacaggaggagcctcttttctcctattgtggatcaagcctaggcctattctggtttgcctggggcagaaagtcatggccagctttgatgcctaggggtaaaggtctctgtacttggacctgagagggactgagaggcctggcctctggccatgtgtatttgggatggcagtctggcccacagaggaacagaagatactcacggaggagattcagggtgactgggtcactgcggctggcactccctgagttccgtatttcacattcatagggtcctgcagtatactttgtgacaccaaatagaaagagggtcctgttggtttcggacagctgaaacctatgagtcatagggaggctctgaccattcatccaccactggtagcttgtgtccggagtctcaggatcacaggttaagatcacagtttccatggcctccctggggtttaagttgctgctggagatggagggcttgggagtctccactgtgcagaaaacagagagaagattgccctgtgtggcacctttgattcctccaaaggcatttttcaatcagagttggcatttcccacctctcagcccacccaagtccttaaaagcccatggcaggtgtgtgtgttacaagacagatgcatggcaatctgagggctcagtgattgtgaggctgcctgctttatgtgggagaagcacagactttctcaggtgtgtattgagcagcagcattgggtcatggaaagacacaggaccagcagtcacagcccctggtgcctctctgagtccctccatctcgaagtgcctgcctggcccaccttgtggtcctcacttggagcatgcagtgctggaatcttcttagtttcagtcttactttgccccctgaggtatgttttctctgcagcttcccttgccaaggacatccaagagatgaatgatggaacttcccattgtctttaaaccctttgggtactggaaagcctggcctgggactgggtacttcagcataaataacacaggggagaccagagtcaagcctggaggtcagttcagtcatcaggcagtggagccacaaggtggggcagttttcccaggtgtctcatagtgagtgacttgagccagtgacctctaaagatagagcagagtccaaggaatgacctacaaagagtgaaggggacaggcaagagctgatagcttctgaacaagaccatgtgccctgttctgggtccacaatgctcccttccccctgtagagggcaggtgaggacgatgtggacctttctagaaatacatgtggatgtttgcaaatgcgaaactgactggtggaaagggtgaacatgaactgatgatggaagtctggccctcatggaccatatgtgtttggtggatattagaccaatatttgggaagaagtcttgcagatactttcattagatattctactctgtttctgagtttaactaccctatgtacctcatatcagtggattccagagtgaatcagagagtagaatagtagtttccaggagctgggatcaggggaatagggcgttgttctgtgggtgtgcggttccagttatgcaggataaggaggttctagagatctcctgtacagcctcgtgcctatagttcattcagataaagtgctccttatgcagaaagcttaaaacaaagtgttttggatttctaatttttttattttggaatatttgccgtatatgtactggtttagcatcccaaatctgaaaaatttaaaatccacaatgcgccagtgagcacttctttttagcatcacatcagtggtcagaagggttgagttttgagcatttcagattgtggatttctggatttgggatgctcaattcgtaatactgtaattttcccataaaaagttgtcaggagtttagacctcatgttatgttctgactctagtaacaaaaaaaatttggaggaaatattaaaatgttttcataagtggaaatttttactgatgatccaaacatctaagatcaattgctggtagtagtatttctcctgagaccaaaataaggtttaggtgtgccgtgaattccagcaggatcacattatgctcaaagaaagatgccaaaggtgattggaaattagcagctccttaagtagagagagtcccgttaaaaggacagaactggtcagtgcatcaattacataaagggaggaaggatgccaaattaaaagaagtgatgtgtgttatgttagtaaatatagaaagaactccctgcttctaatttctgtgcagagttaggaaaaatggggaggaccccaaaacaggtatgtgaaatgctttcttcattttctcttaagctcaggaaacaccactagagtttaagtttgtgtgaaataggaagattctaagtgagatgccaatggctcatgtgtctccccacaagaagaactccaacttatgaaaacggcatcatcatgaggaaacacttgtgtgtggcacaggcagtaaaaccatcagatagcacccacctggtcacctccaactggtcctcaaaaccaccagtattcctattacgtgtacgttacagcatttgtatttgtcccacaactacataatttaaaaattgctactgtcaaaacaaaatattaaatatgaagttgaatcagttgttccactttttcttccccactcttcttgaactttcctgtttcagttttggaaatttctattgacacgtcctcaagctagggattccttagcttttttacttagtgttggaaccgagtgacaaattccaagcttgttatatgcctgaccggaagccagaagtctctaggaagtgactggagaatgtgagctctatagcaggttgaggatggagtcacgagtgaaatgggtgatatgagcccatgggcttgggggactgcaggcctgtccagcctctgacaccctggtgagtcattgcagagattacaacagtgacagcaaactagcatggctgactccatctggcatctagtctcaggctggctgtcctcacttattcctgggcataggccaggctaaccttgggaggaatttagtttatggtttaattttgaagcaagaatgataatagttcctccataaaactaacacccttactttgcccagggacggcctttgtcaaactagtgaaagaccatgagattaagattataggagggaaccgaattctgctaaattgttgtcacagtttctataatccctgactgctccaatgtcatttggctggagttgacaaaatttgtaactaattgatcctatagataacatcactattatagaagttgagattggtcttttgagatgtttctcattcttttgcattctggcaactggctgacctcatccatacctatgattaatggctcagccagtcatgtggtccctacctagaggcggattccagcacaaactgatcatttccctccgcccgcatgattccatcaccaaacaatcagcagtactcatttttcagtcctgtgcccctgaaactatccttgaaaatctctaagccctgatccactggggaggctgatttgagtaataataaacctctgtcctcctgtttggcagacttggagtcattaaaatctttctttactacaaatcaccatttcaataatttttttgtgtgtgtgtgcaggaggccagaagaacttgtctgacaatgataagagtggttggagggacttcctatccctgtcccatggtcttgtccacaggtcagcctcacaaaggggaagagcccttgatgggaatacagtggaagctcattctcttagtgacctggggacattggctcgagatgaagcctggcaggagtggcaactccaggtgatttctgcacctttcctatttcctgggaggttggctaggccacagtgttagaaggaagggaacagaacagccagcctagttagagggagtgtctggggaaggcctaggtgtgagggaagaagctgtgcaggacagggcttgccagtcagaatgaagtgggaggaagatgagggacacagagaagcagagagaggcagagacaccatggcagtgagcagtgagggctacactgacgtcagagaccccagggaccagctgcccccagttccacagtccagaaccaaggagccctgagaaccctctggtggccaaagagcttcagagttacatgaggtggggttgctttaggggcaagaggtagtggggggatgaaacatgggtgtcagcttctgaaggacaagggacaggtgtggctaggacctcctaggattctgcatccaacatccagtctctaaagaggttttggatcattcatttcttcattccattccttcatttgttatgtgagagctcctgagtgtgtgtgtctctcactgggcctgtgctgatgcagggtgtgagtggggaaagaaaacaaggtcctctccttgatcctctcatgacagtgacatggacactttgggaaacacagggtttcaggttcagtgatgggggttaagatctgagagggaggcctgctcatgttttttgcactgattctgacagttgaggcaggtgatttagttctggagtacagattaatcagctgaccatttgctctcactcctctgaggtttggatgcctaagaagagaggatttgagccaataaatgacatggggtccttgggacccagtaagccctcacttctggtggaggagaggaagggcctgtggctgcaggcagacctcatgtgaccctgatctcccctttgtgttggtgtgactctggttcagtgactgtgccttcctgtgcctcagttttctctcaatcaaataagctaaatggcaaatggactgtggcttttcatgctatctgtgaataaatgttaaagtattcacagtcacttgatctaatgcttggcacagtggaggtttcacacaaacagcatttattattaatttgcttccatgagaaagcaccgttacatcagatccctgtggacaagctgctaccaggtacatcttctgtcttctgtttctgcttctggggacattagacttcctatggactctcctaagcctcctaaggcagttggctgatggtcttcaaagattgtctttctgtcctctccactctgcctctcctgttttgacctctgtcctctacaccattgcccagatgaggctctgagggctgagccctagctggtgaacagctccaggagacacagtcctcagacagctggtaaatccttggtcccagtaagccctgcccatgaagccacaacccagccctggcacaggctcctaagctttatctggagcaaggatttagggacagggtttggaggttgaggtttctagggctgagcttctctgagagtatctcaggggacccctcaggccaagccctgctcagttctccagggtctttctcagggtcaaatttatgaagagggcatgaggtgcttggctgagactgatctcctcctgctgagtccccccatcagactgtccttcctctgcagcgagtgtctgcagggtctggatgcgggaaaggaattctgatctgttgaaatgtgtctcctctgtgtgtgtcctgcactaaatgcccaaaccccagcatgggacataatgcagagagggacacaggcacagtctaggcctgacaatcctgtgtgtgtgaagtagaaatgacccctgtcccccaacacccagggatcatgtggaatcacttacggtataaggtgaaggtgaaatatccagttactcctctagtcccatcacctcgctttatgatgtgtaaggtgtaggatcctgcgtcctcccgggtgacattctggatcagcagggatgcattggaatatgctgtttctcgtccactatatgcaggcccatatataattatttgaccgtctactacatatgatgtaatgtaatggtagaggtccctgatttgccctttgtaccagatgtagccagtaagattctggggcaaattgtggacaagtagaagaacatccttcccctcggaaacttttggtggctgggcttcaatcgtgacttgggcagtggtgggcaggttccagaagtttaaaagtgatgctaggaggtggagagagcatcagacaatattgagacctatgtattggggtgaaaagatggggccctgggtcctgaggaggtctcttcaatcctcagccttgaagacacacacacacacacacacacacacacacacacacacacacacacacaaaaggggcatgtgtgtttgtatgtgtgtatgtgtgtgtgtactactgtcctactaggtcaaggtcagcagcatgacccccattccttcaccacttgtgaccttggcatttttctgtttggaatcctcttccccaggggtccgcatgaccccatcaggtcctgctcacatcagggtatcctaagacttctttcctgacacctccttcagagaccctgggtcttccctttctgacctttccctgctctgctccctaaagggttcttgttaacagctgacctcacattctagatctctttgtatgtctgtcttcctccccatgacagcatgagctcagtgaggacagggacttttgtgatcttggttgcaccccagtgcctggaacaggctgcagactcctgtagatgtgagacttctcagggccctccacacccttggtgtttttttttttctcccccaattgttgaggttttttgctgaggacagtgtttcacgtcctgcttatatttttatttgaagtgtcatctgatatagttattattatcatttttcaaaatgtggcccctgatgattaatcaggaaaacagaacacttaagattttcctacctcttaccaattccagttcaatgtgattttcctgttttgacccctgtccctctctggtatattttcccctatccaggctccaacagagccttctttccttttatttctttcttctctcttttttttttttttttttttttttttttttttttttgagacggagtctcgtactgtcgcccaggctggtatgcagtggcgctatctcggcacgctgcaacttctgcctcctgggttcacgtgattctcctgccacagcctcctgagtagctggaattacaggaacacacgacaatacctggttaattttttgtatttttagtagagacagggctacactgtgttggccagactgaccttgaactcctgatctcgtgatccacccacctcagcctccctaagtgctggcttctttcattttttagaaccccatcctctccaggagaccccatccagtcactcttcttcctcctcctgtcctctcccaggaagttctctcctcacctgtgaccaggagccccttccatttgatgtgctctgtgcagggaggggctgagaggggccccatggtctctgctgcctgtgtgttctcctctgtggagatgagcctaggatccagaaacttcctgagcacggctgtcagctgtgctgtccttcctccttctgcactgagcctcttcctggggcagcagcaattcccaggctcatgggtggggtcaggcccaggacacctctctgtcccctcctctctcagtcctgcctccttgtccctccttctgttttccttttgtctgtgtttcaggtccctggggattgtggaggcctctgcctttttcagcagtgattctttcaccaaacctcaacacacactttgtgcagacacacacacacacacacacacacacacacacaaaagagacacacaccgacccacacagtgacacacataccctgcaggttgggcaaggacagtcctgggcctcagcctcctgctgtccccatggccctgggtcggggtacacattcacgacctttgccctctttcatccccatctggctctccccttcagtgcaggaggctggagctgcaccaggtccctgtcacagtgatgtcccattgtgctgtgggtgagctgtgtgttgcctggtgagagggacccttcctttctctaatcgtgtctagcttggctgcagcttccaagaatggacattcaggacctgggtgtcctagaggaaactgtcctttctggaggtgtgcagggtgaatctctcatgcctcttggtaggagaggcctgtgctggttgctcagtgggggctgtgagtcccgtagtcaaggggaagttctcggtcactctctgactccctggggtttggctgctgagctggtgctcagggtttctcatgttcttcctgaccatctttgatgtcctctcttctctgcccagctgattgtcctgtggtcaccacaccttccccgtggtggtgcaggaggaagtggggagttacccaggaaccccgcgggacatggcttgttgagacgcaggagggggaacctgggacagagcaggggttcagagctggagagattcatcccgacttactccgtggccatgatgggctcagccctccatgtgctgacatacccaggggtctgtcctgagggttttgacctggccaagctgctgtgtgtagaggaggaacaggcagtggccagagatcctgtctggagggacattgctcacacctgagagggcaggtgggggtgagttgtgttctgggagcaaagagcaataacacccctcatctccccgcaaggacacaagagaggtctgtcttcccaagggacagctgggggcaggtggccccatcccggatggtacctgtgtgtgaccatcacatgcgctctgagccccgcgcggtgcagcgggcagggaggtcacagggtgcctggctgattcccggggaggctgtgggccctcaggcagccgctgttctgtgtcagctctaggcttggcctgggatgccccagagaacaggacagatggagcaggggtgggcatttagggagcagtgacagaaagagttgatgaggatggagggaggtcaggaggggaaagctcccagtgtagtgtcgcgtgcaccagcgctgccctgggagatgcctttagctgggcccagggaaggagcaggtgtgtggggcaggagctccctgcagagggagtggtgttaggttggcggcagccaaggcagggaggagctgacagagtccgtgtggggagcatggagggcgctgaggacttaggcccaagtgaccctggtgagggtggacactgctgggctgtgggttccgctgagggaggttggcatcccctgggaaggctccaggctgggagggactctgtcgccctcttgtggacagggagggaagtgtgaacggcagcaatcccaggccaggctgcatgttttattccatgtggatctgcacacttcacacgaggtcacacatatgttatgttacagctccttcaccttccagccccgtgagtcccagtctgtgtgactctacgttcactgttctccctctttcacaatcagatgtccgaaacgcagatttttgtcaccttctgtgagtttgtgtttgtgtgcagtaggcggcactgtgtataccctgggggcagtgatgtctggggctgagcactggacatgggcttgggagcagaagagggagcagcagggtgggaagatcaatgttgaggggcagggacaagtcattttcattttctcactcccagggaccagaacccaggattctgactccagggcacagtatcacacccttctggtgtccctggatgtcgtgatgctcatagcgtcatgttgccttggcattcattttttaaggtgtaagtttatttgcctcaaatcagaggcagggcttggtcaccatggcagttttcaatactgtatctggttcaggtggctccagttggtgtccagagataaaatcttagaggcatctctcctgcttggtgtgctgggctcacctctctccagctgctttctttaaactgataattctgacattcgccctcacatttaaagtgaccacctctcagtcacagcctgagctcctggtcccagtgtttgctgcttgctttgaacacatccattaaagctccctgctggaaacctgtcagataacaccctggacttaataaagccattggctcaccggtctctttcctccctgcctgtgctcactgacctctgtggtctccaggtgtgctgagtgctccctagtgtgtgtaagtattaaaaatacttacattttcacattgtggttgtatcattgtagcctcacatgccatccagggcctgacattgaggctgccctatgggacctgtgctggttgagcccctgctggagctcttgttttggggcctctggttctgctggggacaggagcttccaactaacttgattgaaaatctgatgcgtttcattgaaacactgggtcagatgatgtattcatgggcttcagctgccataacaaacaccttagcctgggtgaattaaataatagaaatctgtttttcacagttctgtgaataatatgctattttaaccactttaaaatccacaatcaagtgaaattaaccacatacacagtgttaaattaccatcaccagtatttttcctagaaaatttttatcattttaaactgaagctttgtatcttttaaacaataactccctgtatgttccaccctagactttgatcatctctactctgtctctatgaatttgcctattcttggtgtttcacataaatggaattatacaattatgttattttgtttctgacacatttcagttagcataatgtttccaaagtccatgcatgttccagcgggtgtcagaccttcattcctctttatggcagattaacattctgttgtgtgtgtcaccatatttatttattcatgtgttgatgagcacttggattgttttcatattttatctcttgaataatgctgcaatcaacattcctatgcaagtgcctgtttgagtccctggatttaattccttgggtgtacacctaggaataaatgttgggccaaatgagaattctatgattagctttttgaggaaaagcaaaactctttctcctaggggctgtactttttatattctcaccagcaatgtatgaggattccaaattctacataatgctgctacttgttatttaacattttaaaagaatggtagccagtttcgtaggtgtgatgtggtgtctcattgcagctttgactttgtattttcctagtgactaatgatgttgagtatcctttcatgtccttcttgatgtggtttgcaaatattttctctcattctgtgtctattaattattttcttgataagtttctttgatgtacaaaaggctcacatcttgataaagcccaatttatctttttttcttgtttctcatgcttttgtatcatatctaagaatccattgcacatttgaggtcatcaatatttacctctatgtctattttaagatgtttttatggttataagtctgatatttaactcagtgattaattttttagagaattgtttgatatggtggaagctagagtaatctaaattcactgttttgcatgtggttatctagttgtttctgcactatcatttgaaaggagagttgttcatccattaaattgtcttgacaccctcttcaaagagtaattgaccataagtgtgagggtttatttctagactgtcaattctatcccatttttctttatgtccattcttttgccagcagcttctgttttaataattgtactcctttgtgagatttcaaataagaaagttcaagtcctacaatttattttggcaagattgttttggctattcaggtgtccatttttgaaagatggggaagctaatgtttcacaattgggaaagtcttttctgtcttcttcagggggaaatttgggagaacattttaagaaactttatctaagtaggtaaactctcaccactttatttgctgaagtgctatgttaaagtgtgcattgcctattgtggaagaattgtgagaccctggaagcacctgcccacgtggtgagagacagtaaattccatgatgaggggcagagaggacattgttttgtgatacaatgttgttgggggagttgtatacatctcaacttctttatgtctctatacagtgggtgtagggaccagccccacagggtcagtgggtttttctccccgtgtgcagagacgagaaattgtagaaataaagaaacaagacaaagagataaaagaaaagacaactgggcctgggggacaactaccaccaagatgcggagaccagtagtggccccgaatgccaggcttcgctgatatttattggatataagacaaaggggcaggataaggagtgtgagccatctccaatgataggtaaggccacatgtgtcacgtgtccactggagaaggggcccttccctgcctggcagccaaggcagagagagagaggagaaagagagagcttacaccattatttctgcttattagagacttttagtactttcactagtttgctactgctaactaaacagcagagccaggtgtacaggatggaacatgaaggcagactaggagtgtgaccactgaagcacagcatcacagggagacggtcaggcctccagataactgcgggtggacctgactcatgtcaggccctccacaagaggtggaggagtggagtcttctctaaactcccccaggaaaagggagactccctttcccggtctgctaagtagcgggtgtttttccttgacactgaggctaccactagaccacggtctgcttggcaatgggcatctttccagacgctggcgttaccgctagaccaaggagccctctagtggccctgtctgggcataacagaaggctcgcactcctgtcttctggtcacttctcactatgtctccccagctcctatctctgtatggcctggcttttcctaggttatgattatagaccaaggattattataatattggaataaagagcaattgctaccaactaatgattaatgatatttatatataatcatatctaagatctatatctggtataactattcttcttttacattttattatactggaacggctcgttccctcagtctcttgcctcggcacctgggtggcttgccgcccacaagtgggcatctccattggacacagtaggttttgaaatccttgtttatcctctggggtctgggtcttatcttacctgttagctgcagctgaaagaggtgtctgctaaggcaatgacacctgtggggagaagaagggttcagcagagtgaaagtagctgggactcagagaagccaggaaagtctgactcttagaaactatgggtcagcagatgtgtgtcctcaggggtaaatgggccatgccggtagccactgcagtggactggaagaaggtaagggctgctgggtatcccatgttctgtctcagctctgcagctgaagatttgggccctgggctggtacggccctgcagcaggggaagggtatacaggaatggctgcatatcgggaccaagtccatgtcatcttcttaggcattgttactgcagatggaggattctgttcagagacctggcctggacacatgggagggcccaccccattcttttaaaattattttaagagaacagtattagcaaatgtggtacatgtcttattctgctagaatcagtattactgtcatgttttaccatgtatctcttaggaaatggtgagagccatccacacaatgtggatttaaaggggactctactataatttcagctttcctactctttatagaaaccatcttctctgcaaacacacaggcaatatctctgtgttcatttctactgggaaccctgtatgcaagatggagagagccacatttccccctgagatgttatgtaaaatttgaggttgagatgacatatctgacactctgttgttaccctcagaagctactacatgtgaaattctaatgactgcattatcctaccaagttaaagaggcaggcatgagcaaggacatttaagaggggtgagagcctcatcatgatggggagtcttgttctgacatcttgggaagaaatgtccacagtgtgaagtcatcaacttgttgtcctggtttacagtttgagcatctgttgttatggtgtcgaaaatgttggcgagttctgagtggctcacgcttcaggtacaagggttttcccatgaaatttacattgagttgtccacctccagcttatagggcttctggaacagagtgggtcttgctctttgtgattccatgggagaaagtggaattggaggaactagtagaattcagggaactgtccagtctacaggtggataataaaaacacagaaacaatgaacagagctgcaatctcataaccggtgtactacagtttttattttccacataatttttctctctatgggcatctctagttttaccaatgataatttcagtagaataagtttgtttgcaaaataggttgagtttcttcaaacgtggtctgattgtttacataagtgcagcaagagtatcaatggaccatgtagggtctcttttaaaattttctttgctgtaagtttttataaggaatctcagattaaacatttacaaacctcttgcgaataggaagccaaagcaaggctgacttcagactttgcctacagttcatattggttcattctatctatattcttaaatataaaattccagtcaaagctttggtaatataaccaatgatttcaaatgtgtcgtgttaaaaagagagcagatttttactatacttgtgcaaatatgtgtattaccataaacatatcaatactcctgaatagttgcccaattctggggcagtcaggtagacagcaaaagtaaatgcttcaattattgttcccagaagtatagtttattgaactgctataagctatagatagattaaaagaaaacaattccataaatctagaaaacaaaccatttaaagaatcagcaaattttcaaataaaagtcataaaaacattatcctcattattatcaattgtttcaatgaaatcaatgtttttcctgcttggtaggctgagaattttatgaagatatcagcctgtttgttaaagttttggaagtttttgacagtccagtggtataatgtgaaagttatgagaaacttgtattaaagagttcttgtcagcatcgtttccataaatctccttgaaaaggaagcaattttggactgtagctgattggaaatgctttgaggaagaataaaaacaacatctgtgaatgacaaagattttaaatgactatggttaaaactctgatgagaattcattatgataacacagctcacataaaaagttagttatttctgtggtatatgacattaatggctgataacatatttaatttctaggaatctcatacaatttctggaacaatcatatcagtaacatatccataaatataacatagagaaggtttagcatcctttaccacttatgatttgaaaatgcttttcatataattttacaggtcaaataaagtggcttttccatgtagcttgtgtttctcaacaggattactgagttcttggtggaggtcattaatggatagggccaagaaagtataggcttatgtatgctgaaaaatttccctagataattccaatactcccagctaataatcatgaatttaggtgtcagttttcctattagaacagctgttctttatcctggttacacattagtgacatctgggaagacttaaaaattaccaatgcctgagtctcactttagaccattaaattggatcctatgggtggggcttgggcatccatttaaaaaaatgttttccagtgattccaatgtgtagctgtatttcccctcagatttctctgatttcttgtggcattcacttttttctattttggtattataattattttttgggtcttatcgtctatcttaggctttatgttccttggggtagaaaccttgccttcttcatttctgtatctttcatgaacatatgagttggtcatcaggaaaatgttttcaatcacatgtaggttgtgttctgagtctcaggtttacacattaatgctagagtcattgttctccaggaggtcagaggttgcttgtgatgaagggtatgggtaagcccataatgcagacggtagatgggagatcaccctgtttttagccatagcattggaactaagcattctatgtgtatatcagctggaggggaagggatgtgtagaaagacatatttaattagaatggaggaattatactaggaaatagagggaatggaagcaataaaaattagtaaagagaagaaatgtgaacttatcagataggcaagagtagatccctgaagatttttgaataggggagttaactagaatttaggaaggtaatgaggcagtcatacacaaggaagatttcaaagactggagataagtcaagcagtacctctagcagttgttgaagttgtgggaatggagagaatgacacaagtgagagatgttaaaaaaaatgatcaagagcgttttataaggtattgaatctgggaaacaaatgagcagaggctgaggataatcatttgtaggagacagtggggtacagggagcatgaagaacaggggagaagagacctgcaggaataagtgctgagaagcaggagtttagtgagaggaggaggaggtccagtcccaaatactggcaaagaagttctttccctctcccaagcatgacagtcagccctgcaggaaacagaacaaaaggaaaggccatcatacctgccagtcttcctgaaataaactacaccagggctgctagatcagagccacactggccagtacttcaatcatgatgctgacagtggctctacctgaaaggccaggacaacttccttgtactgaaatatctgtcatggaaagaaaagaagagaaggaataaaggtgatgttattttacagtgtggtaccttatgaaccatcactaagtatgaagttgtttctatttgtcccttcggggattacattaattttgtgggagggttgctggtagatgattagccaactatattcttgcagttttttaatctgtcaacatgtttctaggttagtgatcagtcttctgtcaatttcatcctgaccatgcggcactcagatatttttgaaggctttatgatgtgagaaaggctgactgctattttctgtgtcgttagaactttctaccctttcatggttgcatctttttctcagtgtgtcagttgtggtaggcatgaataagactctgtcaggtctccatggcagcttgtgtttctcaagaggattacagagttcttgatggaacacattaatgaataggactgagaaagtataggcttatgtatgttgaaaaatttccctaggtaattccagcactcccagctaataatcgattaattaataatcaattgacttgattgacagaaggcccaaatcagtgcctgccaaactgataacctactttacatagagtcctcactttcctgaagctcccagcagggatatgaaagcaagcccagttctatgagcctctgttttattctcctgggtgactggggggaagactccccatcagtcttgccatgctttctttgaactctagctaaattttctttctctttctccttcacaggaaccagatttgcatggtggtcccaaagctcaacagacttttttcatgcctgccccacttttcctcacaggcacttttcctaataaattatcctgcatgtccaatctcatcttggatgcatctcagtgggcataaactaacataccaggcttgatttttttgcacttagcttttttctgtctctcccacatgtagccagtaaccatgtcttagtgttttatctgttacctcttttttcatgtgtatagaaaaaaatatatatttccatatacttatttatatgtaatatatatgataaaatatgtaatataaaatgtatagtaatgtaaaacatatacatattttccatatatgtatatggaaaaagaggtaacacataaaacaccaggacatttacatataataaaattgacatatgttatatatatatatgtagtgtctggtagtcttaacgtttctataaatacacaatttttgtcactgccccttccttctttcccatgcagagctcccatggccaaatctccctatttctccaagtgtgtgtcactcactgtcctctgtgctgtggcccatgtgctgtgtccacagcctcctagtgttttatgtgttctctttttctatatatatggaaaaagcatatacatatttctctctatagatttatatacaatatataataatctaaaaatatagaatatgtaacaatttaaaatatgtacatatttccatatctatgaaaaaaggtaacacataaacactaggccatttatatatataaaatccacatatgtaatataaatgccaattttatcatatataaataagtatatacacgatagacttatcatatatatataaggtgaatttggaatgccctgacctgggccctctgtcagtcaagtccctgccatggaggtcattcatggctgccacaactgagacaccaatagaaagatgcagctatgaaaaggtgaaaagttctaaagttgtagcaaatagcaatcagcctttctcacatcccaaaaccttcaaaaatatctgagtgcagcatatccaagatggaattaaaaacttcaatcttgaaaaggaaaaaggaaactggaggactcacactttcaatttcagcatctactgcaaagctacagtaatcaatacagtgtggtactggcataaacgaggacatagtaactaatggcatagaatagagaacccagaaagaaagcttgcatatatgggcaaatgatttttgtcaagagtgccaagaccattccatggggaaaggacagtctttttaacaagtgatactgggaaagttggctatccatggacaattatgaaatgaacctttacctcacaccatatacaaaaaaatgaacccacagtggatcaaagacctaaatggaagagtgaaggctaccagactctcagaagaaaacataaggaaaaagcttcatgttattgaatttcagaatgatttattagttataactacaaaagcacaggcaacaaaaagataaattggacttcatgaaaattaaaacttttatatatcaaaggccattatcaagaatgtataaaggcaaactatgacatagggaaagtttctgcaaatcatatatctgataagggattaatttccagaatacatgaagaacactacaaatcaaaaacagcaaaaacacaaaagcccaattaaaaatggagaaaagactaaaatagagattttattaaacaagatatacaaatggccaatgaggacatgaaaggattctcaatatgactaatgtttagagatacgcaaaccaaaaccacagcgatacacgacctcacacacattaggatggctttgataaaaacaacatgaacaataacatcacaaaacaagtgttttcaagtacgaagaaacattgaagctctttgtgtattgctgatgggaatgggaaatgttatagccactgtggaaaaagtggcatggcatggccagctcatgcctgtaatcccagcactttgggagccgagatgggtggatctcttgaggtcaggagtttgagaacagcccggcatgcgtggtgaaaccctatctctactaaaagtacaaaaattagctgggtatggtggcatgcgcctgtagtcccagctactcaggaggctgaggcacgagaatcacttgaacctgggacgtggagattgcagtgagccaagattgcaccattgcactccagtctgggtgacagagcaagaccgtgtctcaacatcaacaacagaaaagaaaacagtatgtcagattcttaaaaaaattaaagcattaccacttgaaccagcaattctacttctggacatacagccaaaagtattgaaaaatatttgaacagatattcgtacactgatgttcacagcagcatcactcacaatagccaatgggtggaaacaaccgaaaagtctattgaaagataagtggatgaacaaaaatgtatatccatactttggaatgttcttcagtcttagcaagggataaaattttgacacatggtgcaaaatggatgaaccttgaagacattatgtgaggggaaataagccagatataaaagcataattattatatacttccatttatgtaagatagttagaatagtcagttacatagagacagaaattagaatggtgattaccaggggttaaggggagaaggaatgagagttatcatttattgggttcagaggtttagtatagtgggataaaagctctggaaatggatagtgttgttagtaacacaacactaaattgcacgcttagaaacagttaacggtaaatcttacatatatagtgtctggtactcttaccctctctataagtacacactttttgtcgctgttccttccctgccatagggagcttctgtgagttaatctccctatttctccaagtgtgcatcactcactgtcctctgtgctgtgttccaggagctgtgtccacaaactcagacaggcagtgacttcagagccaggacacagccctattcccattttttaaagccttacccatgggaggcttggcttctactggccgctcgatttagccagattcagaacaggccacccaggcaccttatccacatgccctagtcccagcccgggtggagtcagggcagggtcggtcactgggcgagcccacagcaatgcagggagcagagtctgagctgcttctccctcaccaaggggcttcctcctctcatttgggaaaagtatgggcttgttttgaagactgatgttcatcgcagctcatggagtacacacacacagacacagacacacacaaaggagacaggagggatgttttggtgacagaaacagcttgaccatgacgaccctcctctttctccctctgtgaaggcccttacactgcatagggcttcgggctgataaagccatttccctacatttctcaggctggactcaaggtcatccaccagaaatctggaaaacaaagggaagagaatctgtagatatgaattgggagtgttcagaagaaaaatttgagatttattttgtgcatgggacacaggctgagaataaaaatgtcttcctggctctttcttggaaagccagataggcttcacctgaaagcatattgccaatgctccagcgatccacttaccagggactgtgattttcttggttgtgaagtttttgccattagtgactgggttatggacataacacagatagtccccactattctctgtagtgacttgggggataaagagctcttgtcctgtttgctggttattcccattcagcagccaagaatactctgctgatggattagagcccatgaggcaggagaggttgaggtttgaccctggatagtaataggtgtctgaaggataagttgtgggttcatctgggccatctggagcaaagagaataaagccacaggtaatgttatcagagggaatgggaagctcctggtctgtgaaagggacacagtgttcctttttgccaagtcacaaccccgaagtcccagccaaacttcctctgtgttcactgaactggaggagtctaagatattcacctgtttctcccatcacaagctgtggaagctgagtctcctaagaccggagaagcccctgccttcctgggcctacttaggtttgcctgggacaggaagtcatggccagcttgggggtccaggggtaagtgtcttcatacttggacctgagagggacagagaggtctggcctagggttatgtggatttgggccggcagccttgtccatgaaggaaaagaggatactcacagagaacatccaggtgactgggtcactgtggcttgtactcactacattcttcctttgacattcatagagtcctgtgtcactccttgtgacactgagtagagcaaggatcctgttatcattggacatctttagcctgggactgagtgtgagtttatgacaatttacccaacacatgtagattgtgccatgagtctcaggttcacaggttaagaccacagcctcctcatcctccgaggggttgctggtgacatagggcttgagcagattcgctgtgcagataacagagaagattcccctgtgtggcacccttgatttctccatgagcattttccaatcagagttgacatctcccacctctcagccaatccaagtccttaaaagcccacagcaggtctgtgtgtcaaaagtcagatggatgcatgatgatctgagggctcagaggccatggggccacctgctctgtgtgggagatgcacagacttctgaagtgtggatcgagcagcaatattggtgaactctgaattgagcagggtcaaacaattagagtttgattaactttgtttaaattgagaagagtccaagtgaggcagcagtggctcacgcatctccccacccgaaggaccccaccttatgacaatgttgttattatgaatacacaggtgtgcatgaaacaggcagtaaatcagacagcacccacctggccagctccacctagtcctaggaaccatcagtattcccattatatgtatgttacagctttttaggctacaaaatataaaatacgactacagaatataaaatatgctattgttaatacaaaatattgaatatgaagctgaatatgttgttccactttttctcactcttgttaaactttgctgtttcaattttggaagtttctattattacacacttaaactagagattctttcctcagctgtgtgcagcctacgagtaagcccatggagggcattctttatttcccttaaagtgtttttaatctctagtatttcttttgcttctttcttagaatagccatctctgtttaaatcacccatctattcctgaaaggtgtctcctttttccatcataatccttaaccagagttgttttaaatttccagtctgataatttcagcatccctaccacatctgtgtctggttctgatccttgctctgtctttcaaactgcatttttttttttgccatagtctgtcttgtatttttttgaaaaccacacatgatgtactgtgtaaaagggacttgagtgagcaggcattcagtgacatggtggtgagtgtggggagggaagggttctgtgattctggatgtggtctgtgtcctgggctgtgaatgtcacaagtgcctctcaggtttttgtttccactaggtggaatatgataacttgaggaggctggagttggttatttcccctccccctggccagttaagctcccatcaaaccccagctaattaggctgcagtaaaatagtttctcttaaatgtaggtcttaccaagaagaacataattcactgacaaccttccaagtgtttttttttcccttcttcctacaagaaggaggtggattctttttggatattgactgtgagaaactggtagactccaggagctaagagtcataaatctgtccccctactcccaagactaatccatccactggtgtgtttatctctgtgctgtgtccacactgagcctccagaatttcctgaattacagttcaggttttctgaccccagcactggtgcccactggggtttctgtgcctgtgtttctgctgaggtatggtgcatgctctgtatttgcctgtgggtctctccaatatgtgggccagttagcactgagaccttgcttccagagaaatctaaacgagttgttgatttttcagtttgttcagctttttacttcttgttagaactgagtgaaaatttttaagctacttacatacctgatggaaattcgaagtctctagggcatgactggaggatatcagccccacagcaggttgaggatggagtcatgagtgaaatgggtgaaatgagcccatgggctttggaaactgcagatctgtccttctgcctctgaccccctggtgagtccatgtagaaagagaaaccaccattgcaaagcatatgatggtgagaggaagctagcttggctgcccgcatctcacctctagtctcaaactggctctcttctctgattcctgggcataggccagggtaagcatgggaggaatttatagtttaactttaaagcaaggatgataatagtccctccctaaaatcagctcctccttgtcggggactaccttggtaaatctaagaaaagaccacaaattatgggaggggcccaaattctgctaaaatgcaggcatagtttctataatctcttactgctcaggagtcatgtgtccagaggtcacaagatttgtgactttcctagttgctcctatagatagcaagactactgtagaatctgagatttatcttttgagatgtttctcagacttttgcattctggcaaccagctgacctcatctagactcatgaccaatggctcaaccagtcatgtggcccccactcagaggcagattcaacaaatacataccattttcctacctgcatcattttatctccagccagtcaacagtacttattccttagaccttcgcccctcaaagtttttgaaaaactctaacctcagagccactggggaaggtgatttgagtcataataaatttctgtcctcctgtttggcagccttgggctaagtaaaactattctttactacacatcaccttcacaataaattggctttgcctgtgcagagggcaagaacctgtcaggtgattataagaatggatggagcagtcactgatctctttctggtggtctgtttcatgagtcagcctctcagagggaaagagccctggactgggacacagtggaagctcattctcctggtgacccggggacattgcctcattacggatcctggcaagggtggctactctggctgattttggtgcatttttcatttcccagaaggcaggacaggcctcagtgtgagcaggaaggaaatggaaccatcaatcttgttagagagggtgtctggggaagtcctcagggtggaggaagctggacaggacagggctcatcaggtagaattaaagggggatgcacttttttcactgaacacctttcagatatctcactaactctggcctcactgggctctgcctttccttctgagccctgagccctgagccctgattcctggagggagggagagagagaggaagggtgaagctgggatgtgtgctgtccaggtttcttccatctctggaatcttgaaagcgagggaccctagtgtgttaccacagaggagaccatgggaaaaagctgtttctcaggggtgcctggcttatgaattgaggggaattcagaccaggttggacttgtgaactgcagggaccctgttccatgtcagcaaccagctcctctagctcagtgtttctctctgtggctaattcttttgtgtgatttctgagcccatgctagagtcctcctcacgatgcctgatggtcagacctgtgtggggagacctaatgatggggtgggggtggtcttgagtgtcacacagagtgtccagggaacaggctttgtgactttctctaccccagccccacaacaagatctggatagtgggcttggtcagataaagtcagaatccatggagggagggtatgtgtcctggcagtactgaggttcctgcctccaggttagttctcagtctctgcaaatacatttatgttgtgcttgtgctgtctcctggactgtttcatgtccttaaactcttgaacctgtctgcagataatgtcatgagaggtctgcatggaagtgtatgagggctatcagattagggtgggggtgttttacatagtgggttttttttttcaccaaacacgtttcaaaaaattgtggttgagtgtgtatatagaaacacatacatacttatattcattagatgtgaatttatgtttatataaatttaatatatagatacatatgtctataagtatacacgcatatgtatatgtgtatatatatgtatatatgtatatatgtatatgtgtgtatatatatgtgtgtgtctgtgtgtatatatatatacatatatatatatatatacacacacatatatatatatataatgtgccattttaactacttcacttaaggggagagagagagagagagagaagagagtttccactaataccaaatctgggttaaataagggtggtcctatttcctggggttgggcttttgctagatgtgtcagttcctgttggaagtgagctagagaggttatatgcttaacaaatgtagagattttctatatgaaaataatctgtgagcacattgataagttttatcctttcctaggtgaaaagcttggtgaaggattttaaggacttcccattggctgaaggctggcaaatggagtttgccatcctctgactacagccattctgaggactggaaaggataccctgagaagtggcctattttatttctgctggaaggtactgaggtttaatttatcttatggagtcttcctagattagaaggctttgagttgtgttgatgccttgccagtgacttagctgcctgatcagtgaacctatttcctttgtctacttcatctgttccctttttgatgttccctataatgtatcactgctatttctcatggaagaaaactgaggataataagatgttaattttttggtggtattttataggaaatccattagtggtaagaaaatgccttttattttaaatggcagcatgagcatgaagaactaaaaaagcatacttggaatcaatgtaaatgttagctacctttctcttgcttaatttaagtacccttgtaagaactatttgtttagctgattgagcacctgcacctgaagagagatgttatttagagtgactactgcttatcctgccttatatatttcttgctttaccagctgtttgctagctaagcgctccctctagaggaaagtaattttgccacattaagtggaggtgtaaaccgttttttcctagggttaatttggagacttttctgactagtggagctattgtgacagtggtttggaagcaggtgtaaacaataggtcctcctaattgtaaagtacaggttgagaaaaatattgtatttgaatttttaatgagacaccccttatggttgtgctatgggaagagaggaggcctggataagaaaggagaaaagagagagactggatctagtgtttagaaggacgtctactttctttcctataatttccagaatcacctgtgtctcctgtgctgtaatggcagtttcagctgctggagccaggggtttgagccccaggacccatcagtcctgctggacaactgtgagactgcttctgaacccagtgacctccatctctgggagcagttgcatctccagtggtctccaccacaggctggacagggtcaaggtggcttcctcttgctctttggacactccttcctaaaatgccctggcctgccataccgagagcaactagtggatacacctctgggatcctggactttgcaactctgcaaagcagctactagaggctttgtccttctcttgagctttctctctttcttctgggccttctcctggtccctattataaaagactgaagtggctaccctcagaaggttttccaaggtgctatctgctactatagcttgcatttgtaggttccttctaatattgggagatttctatataataaacttatcttttagaatgggctgtcacttgactgaatcaggagataaaaaggtgtgtgctaatagtgcccttctcaacctatccataaaggctgcaggattctcatctggcttttagtctatcctagacagtttagagaaattaagaggtctagccttagtttttcttttccattgatctgcagagctattggggtttcaatcagggttgtcaagaggtactgcttcacttcttatttggaatggtgtttctgctatttcttcactttccatatctccttccttcccttttggtgtattataggagatatgttgctcatctccaaaattctctgctgcttgcagagctgcctatttttcagctacagttagggtttggtttaggagcagcataacatccttccatgtgaggtgaaacacctgacttaaattctggaaagcttctatatacctatcaggattgtctgaaaatcagcctaagtcttactttatttgcctaaggtcctgtaatgagaagggaacttggaaggatcccaaattatggagtttcttctcagatggttcccttggaatttgcttttctaattcgaggggattattctttataggcctgcctgatatggctgttaaaaaaatctgggttgctgttacaatgcttgtaaaggtttagtaaaaatgtcctgtcattgtgcaaaatagaatgagttgcttttctcttcaaagtcctgaggttaaaagagttctagtgcctcagagtgcactccagaggggtgcaagctgaagatgctctgttagccatctagaaaaagaagtgaaaataaaagtgtccttatagtcctcctcctttcattgtgacccagagtggagtggaagacagtgggagcatccccccaactgttttctctccttggctcctgagtcctggcactgtgtaaaatgtgccgcccatggttctaggtgtggccttctaagccatggaactggataaatgaagtgatgggattagccacactttacccatgtaaccttagcttatctgcctgtgatctgcctggcttcctgaaaaatggatctctggagaaactgtagcagttgcctttgagcaagctttctttaacagatggaatgtgccagtttccggttatggcccgtgctaaaacattttccctcagaaaagtggtcctggttaactctgttcttaaaatgcccttactaattaaatcgtgttctaattggagatagaataagtaccttaaatgaacatagggacctaatggcagtttttcctgctgatgggacagtatcagaactaaaatttggctacggaagacattttactcctaactgttgaaagcagagcttccccattcacagaaagggcttttctatcagtgcaaaaagagagaattttaaaagtgcagtgttatggcagaggaccaaaaatgtgcctcatgaggaggatttctgcttccactaggtgacactgttggcttagaaataccatgtgcttaccaaaggaaggagagagagagagaggaagggacctattgggttagttattatagcatttaccgatctttcctaacagaactgttccctgaactgtaaaaatttgcacatattgcatacacagaaagaataggagacatagagaccatggatagaaaggaagaacaaatttgcaacaggatagcaaattaggagacccattactaacatctggatgagctgctggaggctgtgttcaatccagaagcttttgaataacatcagggtgtgtcctggccagaaattctcagctgctccaggacatcccccagcctcatgtgatggtgaggttctccatgaaaggaaactagtttgaagagaaccttgaaattaaaggagagatttgaggtttgctccatactcaccattctgatgtttctatcttctgatcacaatcccggataagaactcccaaataaaatggctctgtttgggaatctatccatggttctttgtcacacactagaaagaattcaggacatggaaacacataaagagtgggtttaggagtgaaaaatttaacagataaaaaagaagagagagagaaaaagctttttcatactgagaaagcagtcacctaagagagggtctccaatttggggtggaatgcaattgattttatacagagacttgaggaggcactgattgatttacatagggtccagggggttgttttgaccaggtgtgctgtttacatagcccgagaaaagactggtcctcccacagtaatcttttattatgcaaatgtgacttctacctggtggtcaccatgacacctgcacttgtggtgacaaggaaaaaagaacagaaaccgccatattgggagtacctggctcttagttgcctgcatctatatatgcatatctgtgcttgcagcctgatcattcagtattttttctgttagaaatggcttgggggctgctttttattaaaggaaaattccaccaagaattcttttaccctttctagctgcctaaaaataatttctcaataactcctgtattaggacccctttaggaaaacagaaaagatgacacagactctcctgtaggggattaaccatagttttcttttctcatggaatcccaagagttgcaagtgaatagatttctctcaggtctaaaactctgttcttctctccgttgtgttacctgacctctttgccttttacattactttgtactgtaaaaatatttgacttgtgtgtgtaatgattgccaggtcagtggtaagagctatggttttgaaggtgactaacagtggttataataaattattctagcttcagagggctactcatttctttgcatgtttagatacaaaagacacagtttaaacaattaaggaaatgcctttgtagcaaggtactctgtgggagtgttgcacagtatggtcctcattgcattttcctcttcttggggacctgggattcagtgaaatccttgatttttaatgtctaaatgttgtcccttccaactggttctcttttttacatatttaaatgattagaatctaaaaattgcatagacattgttgtccctcttccttaatgggctctatcttgagcacagtgattcagttgaagaacagagaccaaattaaaagctacatcttttaagaaacaacaggtgctggagaggatgtggagaaataggaacacttttacagtgttgatgggactgtaaactagttcaaccattgtggaagtcagtgtggcaattcttcagggatccagaactagaaatgccatttgatgcagccatcccattactgggtatatacccaaaggattataaatcatgctgctataaagacacattcacacgtatgtttattgtggcactattcacaatagcaaagacctggagccaacccaaatgtccaataatgatagactggattaagaaaatgtggcacatatacaccatggaacactatgcagccataaaaaatgttgagttcatgtcctttgcagggacatggatgaagctggaaaccatcattctcagcaaactatcgcaaggacaaaaaatcaaacaccacatgctctcactcataggtgggagttgaacactgagaacacatggacacaggaaggggaacatcacacaccagggcctgttgtggggtgggaagatgggggagggatagcattaggagatatatctaatgttaaatgatgagttaatgggtgcagcacaccaacatggcacatgtatacatatataactaacctgcccgttgtgcacatgtaccctaaaacttaaagtctaataaaaaataaataaataaaaccccatggtgaatttctattatttttgtgttaccttggcatctttttaatcttccttgaacacaccaaattttttcctgaaagagcttaagttctctctttctctctttgctttgagatgtaaatgtgctatgtattttctctgaaactcagtaaagccttcctcagataaatgttaacctttaccatttacaagaaagcaatttgaatccaactttcctttaaaatggtgggttttaccgatctcatgcctaaagccctaaaatcaaaattctaaaatctttttgtctctctctatctttatgtgaacatatatatgttatatgttttataacatacatgtttatgtcacacatttatatactgttgacacatagtttcaaattaatgtaaaaataaatgagtactcacaaattaagtgaataagcccaaatgcttttctatacatgtgattttaataacctttggtgaatatagttttaaaattgttggtaaaataaagaagaaatgtcttcgtaatttaatttatacgtttttgcctatgtctgttggcaggcaggcttatattgtctttactaggtgttttaaggtcatcaaacagttgcttccatatatatacattttcttaatttgtctgtgagcttatgtctttatatttgaagctttaaattctgagttctagatgagtgaccacagtaagaactggggacaaaacccatcccatcctccagctgtgccttttagccatgctgggagagatgagattatccaggcattttcttcatagctctgttctttgtcttgggctttgcttgtggtacatagttagaatgatttactccctagttttttttctactgagaataaggctgtatgagtctgtttttacattgctacagacaaatacatgaacctgaataatttataaagaaaaaagtttgaatggtctcatgattcagcaggttgtagagtaagcatgattctggcatctgctcaactttcgaggaggcctcagaaaacttacaatcacggagaaagccaatggtggaggaagacatctaatataatgggaactggaggaagacagcaagtgttgcacactggtaaacaaccagataaaaactcactgttgccataacagcaccaaggagaatggtgttaaaatatgagaaaccacgtccatgatccaatcacatccaaccaggctccacctccaactttggagattacaatttgacatgagatttgggtgggggtaaaggtccaaaaaaatattattctccacgtcatccctcccaaatctcatgtctttctcacattgaataatataagaatggcttcccaaccatctctagagtcttaactcattccagcattaactcaaaagtctgaaatagcaagtttcatctgagacaaggcaagttccttttacctatgagcctgtaaattcaaaaacaagttagttactttcaagacacaatggaggtataggcattgggtaaatactcccattccaaagggaagaaataggctgaaggaaataggatacaggccccatgaaagtctgaaaccttgcagcacagtctttaaaacttaaagctccaaaataatctcctttgaccccatatctcatattcagggcacactgatgtaaggcttaggcttccaaggttctgggcatcacaggaatattccaagagagtcacaaaagaatttgtagtgtggcttttgatgctaaacagtgtattagactgagtaagtcactgaagagaaaaaagtcagaggagaagatgagtgagggtgacagaaatggaatggtgaaaggaaaggtctgataaaaatgtttatcggctgggcatggtggctcacgcctgtaatcccagcactttgggaggctgcagtgggtggatcacgaggtcaggagtttgagaccatcctgaccaacaaggtgaaaccccatctctactaaaaatacaaaaattagccaggcatggtggcatgcacctgtaatcccagctactcaggaggctgaaggcaggagaatcacttgaacttgggatgcggaggttgcagtgagctgagatcgcgacattgcactctagcctgggtgacagaatgagactccatctcaaaaaaaaaaacaaaagtttacccaggggctcatctggtaccttgctctgtgactaatatcttacacattttgatttactcttccactttcattttctgatgcgtgaagggtcacccttctgctgaagatgagaaaagaggctgagggagctcaaatgagtggtctagagtcatccagctacttcacagagcttgtgtgtttcaccttgacgttgtgcacagacagaaaagtgagacacagaaggaaggcaaagcaagtttttgttgtgggtgacatttatgaaagttacctgtgttggcagaataacggactcctaaaatgtttgcaccctagctctagaacctgtgcatttacttttcttggtaaaaacacagtgcaggggtgataaaattaaaatcttaagatgtggacgttattctagattatctgggtgggcccattgtaatcagaagtgtccttgtaagtgacaaagaaaagcaggggcatcagtctgagaatgatgagcctgtgaaactccactggccaatgctgagtgtgagcatgcatcaaaagacaaaattacaactaatgtagttatagattttattttttgtttattatttgaggcagctcttactctacaaatatggtgacagccctccctgagctatacaataacaaaacagtgggttttgtcaagtgggaaccagtaaacaaagccatataaataaataaattggtgaacattagggtacttcaggtctcttttctgtaaaagttaaagcagaggaaacttttattatgctatctcaggtagagtggaatctcctgttttcaaccaaaaacaaaggtctgttctggtatctctttgcttcattaaaatttcagttgtagactgtagcatttagcatgagtggttctattttggagtctctaggctctcacttaggtgagtgtgaccaaaatttaaagcattggcattcatctcagtaaccatcatattgggcttccatcatttataggtttatgatgtcttcctgatcacacatttctttgagtttttgtcatttcagccaaagagagaccctttggtatttgttgatggctgcacacaaaactttctaaaaacttttgtagaattcaccacaccaaaatgtagaatttaaaaacctatagaatttatcacaccagagaggctactaatatgactattaggagggtaacaccaaaagtttggagtatgcactttaggcaagatgcaaaccaagcaaaatagaatagatcaaagaatgagccagaagagtctagcaattttaaccaagtagtatgtttggtaacttctgtgattgagtcattattatactcgatacatttgtttatgtgtaacaatcagtgtcagaaactgcacaggctcctccctgttcagctggtagggaacaactttattatgtagcattcgatggctcattaaattaaaacagggagtgaaaacaagtgagtctgaaaatgtaactttaaaagggccactgtacatttgaacaaacaattgtgttaaagatgctgctaatgtcagccattgggtggactaaatgatatcttctgtaaaactttgagggtgacgtgatatatctgtcactctgttacgctactctcagaagctacttcacgtgagattctaatgataccatcatcctgccaagtgaaagaggcaggcataagcatggacaaattaagaggggtaagagcctgattttgatgtgaagacttgttctggcaacttaggaaaagcttttcacagtgtgaagttgtcaacttcttatcctggttttaagtttgagtgtctgtagttatggtgtcaaacatattggtgagctccgagtgactcatacttcaggcacgagggttttcctgtgaaatttacattgagctttccacctccagcttataggacttcagtaacagagcagattttgttcttactgattcaataagaaaaaactggatgggaggaactagaagaattcagggtctagtccagtctaccggtgaataataaaaactcaaaaacaatgaacagagctgcagtttcatagcaggtatactacactttttatttgcaacattatttttctctctataggcatatctatttttaccaaagataaacccagtaggacaaatttgtttacaaagtaggtttagtcttatgaaactttgccgggattctttacataggtgcatcaagagtagcaatggacgacagaggctcttcctgaagtttgcttcgctagaagtttttataaggagtctcagattaaacttttacaaacctctcaaaggccatcttcagactttgcctgcagtacttatgggtccattctatgtatattctcaaatataacatctcagtcaaaggcttggtaatataaccaatgttttgaaacgtgcccttttgtaaagagagaagattcttactaaacttgtgcaaataactgtattagcataaacatatgaatactcatgaatagtttcccaatcctgggacagttaggtaaagagcaaaaataaatggacttcaattattgtttccaaaagtatactttaccaaattgctttagatatagatagcttaaaagaagaaaaattccataaatctggaaaaaatcatttaaagaatcagcaaattttcaaataaaaattataaaaacattatccacgttatcatttatttcaatgaaattatttttgttctgcttggtctaggttggcatatttcatgaaggcatcaaccagtctgttaaagctttgaaagtctatagacagtccagtgatataatcttgaactgctcagaaacttgtatgcaagagtacttgtcagtatcttttccataaatcttttgaaatagaagcaattttggactgtagctgattgcaactgctttcaggaagaatcaaaacaactatctgtgaatgaccatcatgtaaaatgactattgctaaaactctgataagagtttgatataataaagagagtaactccagccagtacaccagtcatgatgctgacattggccccaactgagagatgaaaagaactttcttgtcctgaaacagctgtcatggaaaaaaaaagaagagaaggaataaacaataaagacagcaagggttttaaccaattattttttgagatagggtctcactctgttgcctaggctggagtgcagtggtgcaatctcagctcactgcaacctgtgcctcccaggctcaagccgtcctcccaccttgctctcctgagtagctgggactagacgcacacaccaccatgcatgcttgatttttgtatttttgtagagatgggcttttaccatgttgttgaggctggttttgaattcctggactcaagttatccacccaccttggcgtcccaaggtgcaggcattacaggtgtgagccactgctcctgccggtttcatcctttttataataagaatgaactccttatgtaataataaataaataaacagaaattatttgctttggatgtagcaaatgtagatttagattgtccagagtcaggagctaagcctcattttttttttttgttttagctcagtgtagagtgcattgaagttgtcctaaaaataattccatatagtaagccaactttaaaccctgctcacagccagatctgccaagagtgagccacgtaaaattaccaaaaagggtggttctgactgactccttaacaataacgtggcttacaaacaaagactgatatgaaatagttgatccaacccaaacactttgctcatttcccaaaattttctatacaaacatatacaacttaccacaacgtaaagatcataatgaaaggtttgccttttattcgtttaaatgaccatatgtttagatctgatgtactgacagtgataattctccattaaacagaaacctaataaaatttgaaaaatagtgatttcatatttagatgatactcagatcttctgctacgtatgtggaaaatggaattattgctagaaacattgtttaaagattagggtatgaaagaagtattaggaagtcaggaggttctttctttaggaagcagcttatctggattcattcaaagagctttaggccagtttgaggtctttctgcaaaatgtaaattgctatctgagaaaccatatatagtccaatgatgaaagaatgcaaagccttagaagcaccggagacaattccagtatcttccctaaagttctgacaaaaaggaaaataactatcaaattattcaactcgaatgcttattatgtatgtataagtcagtcggcagatgaagagaggagggaaatatgacttctacccttagggaacacatagtcttgtgggggccactaggggtggtggtgtgacctgcctggagcagcgctaaatatggacttgtgagtcaagggctatcaaaacctaagtaaactgatggccgttcagagaaggtagagttccattccacagtttgcaagaaggactatttcatggaggaggtcatgttggactagacctttaaaagttggtagaatttaaagggaaggatatggaagcaggaagagtgacaatgagcagaggtacaggagtgaggcaagggtgagcaattttaattttttaatagtggtattataaaatgcacatcaaaatttgccatattattattattattattttggagacagtgtctggctctgttgcccaggctggaatgcagtagctcaatcatggcttactgtagcctccacctcctgggctcaagcaatcctcatacctcagcctcctgagtagctgggaccacaagcatataacaccacgcccagctaatttttatatttttgggagtgacaagatcttcctatgttgcccaggctggtctcaaactcctggactcaaatgatcctcctgccttagccccaaagtgctgggactacaggtatgagccactgcacctgaccccatcttaaaaatttctaagtgcacagttcagaaatacatttgcattgtgcaaccatcagcgccacccatcttcagagagtatttttcatcttgtaacagggaaaattcatatccatgaaacactaactcctcatttttcctcctccccaccccaggtaaccactattccagtgtctctatgattgtgactgctctagggacttctataaatgagatcatacactgtgtatctttttgtgactggcttatttcacttagcataatgtcctcaaggttcattcatgttgtaacatatgtgagaatttttttccttttgaaggctgaataatatttcattgtatggatagaccactttttgtttatccattcatctatctatggacacttaggttgccttcactttttggctattgtaaatagtgctgctataaacatggaggtaccaatatctgtttcggtctctgctttcaattatttttgctttatacccaggagtggaatggccaagtcatacagtccctctagttttagttttctgaggaaccaccataatgtttttcacagtggctgcaccattttaattcttatgaatagtgcacaggggttccaatttttccacagtctcattaacacttattattttctggggtttttgctttgtgtttgagagtagccatttaaattcgcataaggtataatttcattgtggtttacattttcatttccttaatgattagtgatattgatcaatattttctatgcttgctggccatttgtatatcttctttggagaaatgtttattcaggtcgtctgcctattttgttaaatcgggttgattttttttgctgttgtttaggtagagaaagcaatctttgaataccagtgatgtttcactaatgctgggccactgatttcacaagaagttgtatgaggtattggaatgtgtgtttggtttcaatcatggctgaggttaaatgccttttccaaaattcagtgtgaatttcaccagaagccacaaaggatccaggagcaagaacatggtgtgactgctctgtgctaaagaatttcagcctgatgacagtgagcaggctacacatgagactaacacaagaacaggtggagagggagactttccactggaagaaggtgattctaacatgcagaatcaccttcaaggagcaagtaagcagaaaaatagacaatggcacagtggccaggcaagaagacactaggtccagaatctgaggttcaaatcctggctctgtgagataaaaacatgccttggtttccccatgctactgaaacaccaggggttgggtctaggtcccattgctcactgcacagaaagccaaccactgagacaatgaacattgccagggaagaaggctttatttgggtgctgcagccaaggaggtgggagatcagtcttaaattcatctctccagcccactcaaattggagggtttatatagctgggaagggaggtaactacctgcagggaaaacagcaattaaggaggggtaaggaagcaatcatgataaatgaagagtctggtgtctcattctctgatggtgatgtggtgaatttcagtctcttgcctgaaggtccgtttcctaactcagatgactgacaaatgttaagtttcaagttttaagaccggatgggtcaatttctatgtttattcaaaaaccctgtaaatatcagttctatgtggaacttgagctggtttgcccccagttatcacagttagtgttaaatgatgcaatataagtaaaacaccagcagtttctgacacacacacagagtgcatgacacaagtggtgtgttgggacaatatagctcagtgaactccctttgtctactcagttatattgagcaatgaggcatctctgaagatgccactttgctacttctcccctgataatttcaccagatccagccatatgagcactgcaagtggggacttagcttaaatcattcctcatatttcccatgcaggtaaatcatttggcaccaaaacaggcacagaagtccaagtcctgctgccagctccacgactgatggcacagagagacttcaggattagtcctttaatctctgtcctctattaaatgaaggtcatcatgctgctgcctaatgtaaaaggattgtggggattttcatcattcattaatgattatcttattctttgaaaccccaagaaaactatataaattccaaagtctaataggtacacaagggctttattatggatgattaagtttcaaaggatgctaacccaaaaaatttttttttcttttttgagacagagtcttgctctgttgcccaggctggagtgcagtggtgcgatcttggctcactgcaagctccacctcctgggttcacaccattctcctgtctcagcctctggagtagctgagactacaggcacccaccaccacgcccggctaatttttttgtatttttagtagagatggggtttcaccatgttagccatgttagccaggatggtctcaatctcctgaccttgtgatccacctgcctcagcctcccaaagtgctgggattacaggcatgaaccaccgcacccagccaaaaaaaattttttaatgcactctcttttccatataatcccaaagtcggtgaatcacctctaagtcaggtgtttatcttagctgatactgccttagtgttggcacaacttaaatttagttcaaataatatttgcatgatctttgcacaacacataaatgcccaggaacaggtggtgctcctcggtggtcaacaccaggattgctatggcagggcagattctttctctatagcccaggtcactggcattcaaagaaatatttttcaatctctgatttttctctggaagtaggaaaatgcttccctaactgctttacttgtaaggatgtttcttgctaattctgtgcccagagtaactaatggggacatagacatagacatcattcaaatggcattctctctttatgataacccatgctttaaaatgaaataaaccaaacccatgccttaagacaacagtcaagaaatacattctgcctaaggaaaagtcctgtgtttgaaggttgttgtccaaataatctgacgttgtggtcatgaaacattgaaaatagcatttggagcagtaagtataaaaaatttagaaggactaaaactacttgaatgcttgttgggaggtttacaatgtagtcaaacaccagttaagcaaaaataaaatttactacttaactgtttacattttctaatgtgtggtttcatggaattgttgagatagaagtagacactgaaataggagtacttgaaagtaataagacagagatttttataaagttatttctgacctaattaagaaaaatataatctctatcacatatgaaataaacaactttagaaaaatgcaatgtcaaagaaaacacttggaatggccaacaaatatctactacagatagaaatgaaaatatttatgttatgtaaatgttgggcatcaaattgtctccgaagttgccttctagagaactttgtttagttggtgtattcttcctatgaatcaaaggaatacagtcttatgataataagtaatgagggataggagacaattttaaggattttaggaaagtagggaagcagtgaagtgaagggtaggcagatacttcggagggtaaaaagtgtttttgattcaaaagaaaagctaaggtagtttgaagaaaacatgcatcatctactagttaatctggggtacaatgaaggtggtgttattttagcagtgttcagaaaagaccagttaattctgtggccatacagaacgaatggaaagattgcaaaaaacagattctgaggaatacaaatcaatctagcaaggaactttatgatgaaggaccaatgtaagcatagaatgcactgtattttttattattattattagcagcatcattggtatggtgatgttacctacttttggagtggagctagatatgagagagctgcatgtcccttgaactttatttggggtaaatagtgaaaacaatatctatgatgagttaatgggtgcagcacaccaacatggcacatgtatacatatgtaacaaacctgcgtgttgtgctcatgtaccctagaacttaaagtataataaaaaaagaaagaaaactatatctaaataaaaaagaaaacattccagaggtgcagaattcaagctagaagaattgtgtccttggatgtcccaaggtcaaattttaatatgtcattgaatgaaggttccaatgtttggaataatgaaaaaagtcatattgaattttgtctttgctgtcctccctccccagtgtctaccaaagaggctgagtaaatattcatgcaagtcaatacactgtcacagccacaattcatcctagcaatctttcctggaatagtcacttaagacgtatctggtgaggacccattggcacttttagagcaatcagaaaatacctcaaattgctcacatctagtgtaggagaaggctaatccatccctgtttcatgaagcatcacttcaatatcctgggacagtcattctacccaaatcttctctccctagagcccaacactctctgcatcttcatccattcttcacggggcttgatttccaagactctctaccatcttggccacacaccatgttacacattcactatggacactgcaccactgcggatgctgcaccaagggttctgaatccaagggcagattgttatgaacagcccctttaaaagtcttaaacgtgatacactggtctgtcagcagatgtgcagagcctcttatgggagacgcaatatttgactcatgtgattcaatgtccataagtcttcatccgaaagatgcccatagagacaaagagcagagtaaagtccttgcagcagtgtttctcaaacttagccacccaccagaactgcctggggaactttgaaagatacccatgctgaatcccacccaccaagattctgatgtaatgctatggggtgagatctggacatcaggatgtttggaatccccccaggctcatttaacatgcaaccaagagtgaagcccactgtcctcagcaatgtgcccagcccggccttcctggcatccccccatgggtacaggatgacagtttctcactctgaccctttcctttattcaatacagcacagcacaatccaacagggtgagcactgttatgacagagaacctcgagtcatatctgattaaatgtcttcaacaaaaccagtgacaatccttggccattcaactatcaattactactttcaacccaggttctaaaggctcttcattagaaacatctcgggttgataatgactggggcaaatgtgccctttggatttgattgctaccatgattattaattaaccgaattgtagagatatcgagtacatttctccctcttgtttgtaagaacccatgagagacaaggccaattgcagacaatgaggacgtcctcataatagtgagatgaactgcctaggtatcttccgatatccttacttccctccagttttgttgcttgcaaaacaacagaatcttctctccatgaaatcatggttatcagttaggaagtagcccacttggttctggatttcgtttagagatttaagatagtaacagagggtgcaggatgacaaacagaatttgtacactgtgtctggtagtggaaaatacccaacagtgtactgtatgctgactctgtcatttcctgccttctctcctcctttcctccctcccttgctccctccctctctccctccctccttccttccctcatgaaagcatagctcgtttgccattctttcctccagtcacaagccatctactgatgcacatcaccatgctcatgccattaccagggactttctatcagcatgaagacatgaaaatgcctgggggagaaagggtgtggggagcaggtagcacccctgcaactgcccggtagcatttatacattgctctcccaccttggtttctatccatggctttcctcgtcagagcatgttcactttaacctcctctagagcaatttcttggatccttcaagggctcaagaactaagcataagttcaaaagaaactgagtaggcacctaccttctggaaacaacatccatagaaaagacttgattgctatggtctgatttatgaacctgtatctcatatcaggttagcatttgcactagcattaaggtattttcattgagatcatttatgttttgaaataaatactacaacatcaagaaactgtatcagttggagaatagcaatgtgtatgatttgtgtatataaatatgcacatcaaagcacttatttatttcagagagttgtataacaccgtcagagtaaaaattgagtgattctcttctatttctgaccctacttctaatgtctcctctgtccctctgggcaaaaccatttaaaccttttatcttggtttcctttgtgagaaaatggggataatagatacccctgagccattctggagacatgtttggatgccagcccagttatgtgaacacaggagaaaaaagctttgagcttttggcactaaggtgctacataaatattattagcaagctgctgagattttatctttggaaactaacaagcatttctcttctaaagcctcatatctttagcccccggacacatgttcctgatagctctgtctttacagagatccccttggctccacaaggatatagatagtgctttgctgagagagtcactaccgcacactcagatgaaaggtattcattctgcttggcagagtcatcggtagagtagctgctgatcccagcaaggcacggtgggtgatgggaagggattagattaggaagaaaagggaacctctcgttctctcactgagaggactgtaaacctgcagaagcacaacagtgagtggactacgtgtaagtgccaatgtgcaaagtcgatagtgcacacgttacaggttggcgagagatgatgccactcagacctgagtgcaccgtggaactctcttgaattctctctgcaaatgggttgcccctggatgtatagagttattctacaggagtcctgctcctaactcatcagaaacgtaatgacctctgttgatctcaaaggcattttcttctgttaaaagtattgtccattcagcaatatggagaaagatcatttgtgaaaataaaatagaagtgtctgatggtagtgggggtggggggtgtaatttcctccctatgtgagtagcattaagttcactcttaatttttttcttcatttctgtaattggagactgatttatcaagaggatatagaattcagtgactaattctattaaatgtttaaagaataaaataaaagtagaattcaaaaggcttactcctgattagttttcaagatgtgtctaggcacaggaagttaaaaataataccacagtgaatgctctgacccagtgctaacaaaagcttccttattttggtgagacttggcatagaaaatcacacatgtcattcagcggtcctgaaaaaggatgactgagatttggactggttttccagggaataaaattgagtgactttttaaaaagtgctactcctagaatctgggatctaatcaatccaatatcaacttcaagggaataggccaacaaccagagatgaaactagaagacaaataattagaatagcaagcataggttggttttccatgctatgattctgcagcaaatgtggtaatttgggaatactgatttggggaatctcttgtcatgggaataagttgtgttttgtcagctttgctgagtgtctctggtgagctaaaagtgattaaaacagagtgctggccctggtatgtaagctgtaatctatactccatatctaccactagccattttgaaggaggagagttccctgatctacctcacgggatgtgcaacaggcgtgtggctcacccgcttagttgctcaaacccctgatgggagatggagcacacagatgggcaggtgcaggggctggagtgagtgctttgggctccagcctggcagtagtgtctggaggaggggtggtgcctgcagcccaagtgttacaatgctcttttagtcttgctctctgcaaatggcttaagtgttaaccagctcaatagaccttctgccatttcacaagggtagagggccagtgtgacagctttctgtattcccagcctttgcccagtgtcccagaagaatcgggtcacacacacaggcttgaaggatgaatgtggggttttactgaatggtggaggtggctctcagcaggatggatggggagctggaagggggaatggagtgagaagatgatcttcccctggagtttggtcatccagcagccaatctcccctctgaccacccccagtttaactcctggcattcacacattccttcccttctctctttctctgctgtgtcatctgccatttgtctgcttgtctcctcatctcctcatctgcttctggagcctggcgtttgggatttatatgggtacaggatagggggacatgtcagggaagaaggcaacttttcccacttagggccatgggtctccaggcttgagtgtagggcctttgctggggaactaccttctttacccagtatttccctgtctcctgtccatatcaatttcatgaatgtgtggtcacaacatgaacccagaatttggaggttggaaagtaggagtgaatgcactcaatctactagggtgccaattcatagcatctaatatggtaatgatgaattagcaatagaatcttttggtaggggcagacttagtgaatcttcaaatgtggcaggattttaacatgaatcgaatactatctctcagtcaatacaattacctccaccactccccagttcctaattcaagggttatattttcagtaactttatgtattcaaaactgtattagatgctagaaatacaaagatgagtaagacattattaatctctgtccataaaaagatgaaaactagtgtggaagacagccataaaattagagattaatcttatctagaaaattctagaaacaggatgaagcacaacagaggagtattttaggcaacctcaaggcatttaacccaacctggagcctttagttaggttagaatatggccaggaacaggaagtcaagattcaacaaattgcaacactgcaataataactaacatcactttctaatagtgtttatagtgttttctaatatgaaatcaaaatctgtctttggataacttttactcactccctggtcttgtttctgttctctgggatgacacagaatatatggaattcactcttactctgcttagtactgagaaagcaaaaattaaataaggcattcaaaattcttgtctgtataggggccaagggaaagcttccccttcaccctctgaaggtttgctgataaccaactgacaaaaggaagattcacaggagaaaaagcttaaatatttatttgatcacagttgtatatgacatgagagcctttagaatgaagaccaaaagatacagaggaaaccgtccatttttatgcctaggttcaacaaagtatggacagccatgtagaaatagggttggattcttcttggcctctctgagcagtgcttcttccttctgggtgtggggaaaattcaccatattccttaggtcccctcaaaggcccctctattcactcttttcaggaagggcgagaggaccaatgaataaccaactttctggaaaggggggtcttaagacctacagtcaaacaaagtaggtcagatcatttcttcttttgttttctcttttcaagaggcagggtctgattctgtcacccagggtgaagtgcagcggcctgatccatggttcaccacagcctcaaattcctggactcaagcaatctgccagtctcagcctctgaagtaggtaggactacaggtgcgtgccgacataccacactaatttttaaaaatttttgcagagatggagtcttgcaatgttactcaggctggtcttaagctcctgggctcaagcaatcctcctgccttggcctcccaaagtgttgaaattacagatttgagccaccacacccaacccagataatttctgtatggcccgtttttacgcagaaatgtagagggaaaattagagtccgatttttaggttttatggctggctttggggaaaaggggttctgatttctagtacccatcagggggaagagggattctagtttctaaggtgcctccagggagaatgggactcagagacaggaaggcagaagaagctcagagagaaagttttgcttctgaggctctttcagaaggattgcttgagctcaggagttccataccagcctgggtaacatttcaagactccatctctacaaaaaattttgaaaaaatagcctggcacatggcatgtacctgcagtcctagctacttgagaggctaaggcgggaggattgcttgaggtcaggagtttaaggtgtggtgaactttctgaggctttgattttgtggtattgctttctgagccttagacctagaacaagcattcaggtcatgggggaagttcataggagaatctctattttttaactatcaaactgtgactcccacattggccacttggggatgctgtcactcataggcctgtcatacacctttggtgggtagggacaggaaaggagattgagtagcataagataaagtcctccccaccccacccatttcaataataggatccacatttatcatatgccagtctgagacacttcctgaacttcacgattcatacagtgttagagagtggtctatacctttctccatgacctccagcccacacgaggttcagtgaccctaatgccatggaggccaggatgctgtgattgagatgagagcaggggtaagaagggtcttttctctgctcatggagcactggaatgaagtatctttttgggtgctggacagtggggaggtcaagactgtgggcagaggaacactggagccaatgttgggaataattctcatgcaagcaaagatgtggtatttggctggtcacaaccccagaccttgagactccagttccacaggggtccaggatattgtttccatgtacaagatccatctgtgagaatccagcactttccaccacctgccgtggtatggctgtggtcccatgcaccatcacctttggcttcaacttctgcaatgaccccctaattgataacctggctcttgagttgaccttacagcaaacattctttttgaagaaaagtcacaggacttcaccccactggccgaaaccctccactattagctgccactgcacacagagtcgaagcctaaggcattgcacttacacattttcatgttatattattgcatagatgttattagtttctgagtagccaggagagcattttttctgcaattaaacatatcgaatgcaccacattctttaggtcccctcaaaggcccttctattcactctatgtcgggaagggtgagggaaccggtgaataaacaaaggtccttgtttaaaggctgttatgaccataaagtctgtgtatttcacagcccatgacagcagcatcctgagatattatttattgtcaaacttctcaggccacacatccactgcaatggggaatgggactgagcaaatcgcaagttcttggttctatgttccagttgcaatcttgctttcagttttcctgctgttaaaacagcttttgctggtagaactgtgggaagtgagaatagatttccttttacctgctgtgcatcagcagaaaaaacaagtctttcttttctcctggcagctgagatttctgagttcttcctagaattggatgttatatatgatctactttactcatgcccacctgcatacacaccaaagcctgatgagcggtacaaacccacccaatgttttcccccaaaacagaagtaacatgagcacatgtggaactgtcagaggtgtttgaaccagggcaactgcatcttgaataggagcagggtaaaatgaggctgagacctaccgcgctgcattcccagacagttaacgcattctaagtcacaggatgagataggaggtcagcacaagatacaggtcataaagaccttgctgataaaacagtttgcagtaaagaagctggctaaaacccaccaaaaccaagatggccacaagagtgacctccggcggtcctcattgctacattcccaccagcgccatgacagtttacaaatgccgtggcaatgtcagaaaattaccctatgtggtctaaaaaggggaggcatgaataatccaccccttgtttagcatattgtcaagaaataaccataaaatgggcaagcagcagcccttggggctgctctgtctatggagtagccattctttcattcctttactttcttaataaacttgctttcactgtatggactcgacctgaattctttcttggcgagatccaagaaccctctcttggggtctggatctggacccctttccagtaaaagaactattcattttatcttttagtcatcaccaagcaaacacaattataaataaggaaaataatatatgattgtaattttactcataatcccaaatgtctctcatgaccagcacacctttggtgtattgggtctaaatcaaagaaaaattcgaggagttgaatgaacaatgttttgatatcttaatgcactttggagaaaaccaactgttgcaaaaagctaaagaaacaaaaattcattgtttatagatcaggccacgtgtttttcatttctgcaatggcgatgttgttgattcccatggaacacaatgagagtgtgatcttctcctttgagattgtatttattgataaatgcaaaaatgctaatgaatcctaacttgctggttctccatggccttccttcctcccgccctttccaagaaggatgcagtatctgtcagaggcatttgaaccagagtggctccatcttgagtgagggctaggaaaatgagacttgaacttgctggtcggcattcccagaaagttaggtgttcctagcctctagatgtttacagttaagggaatagactgataacgttcagtaaacagacccagaattgggagtgtgctattgttctggaacatcacatataagtaaaggagggatttcctcttctgaccaagaaggaataacatagactggcttaactctcgtacctgaaacaaccagaaaaacaaacaaaatatacgaaagagtggttttatgactctggaaataaggcaatgaaggacagtgctccctgagagccaggaaactaacaaggtgaacaccatgtttggcacagctgactgccttgacagggctgtagggcacacaacccactctggggaaagaaccatctgaaatagagaaaatagtgcatggtgctcacacagggctggaaagagtgcctgtttccaccagccagactgaaaaaaaccttgtaatgcataagccatttggctagactactcagaaaggtcttgtgtgaatagtggggaatatttagctgcaggctgagtcctgctctgaatctccctaatgattcacaatagcaaggctccaacgttgccaattgtctccaagtaacttaacccaaactgagcagatcgctcaaaaatgtttgcaggaatataaaaatatctggcatcctaaaaagaagactcacggtgtttggcatccaatcaaaaatgtctaggcatgcaaagaagcaggaaaaaatgatacataatataagaaactcatcaacagacactgactaagaatggatgtatatgtgagatcttatttttggtctcaagattttgctgcttgtttgcttcttgaagtctcatggttttaggttttatatacaggtctatggtctatcttgagtaacattaggatgcgtgtatgtttatttgtatgcattatttgtaggcataaaccgaagttcatttctttgcatatgaatatcccgttgttccagcaccatttgctgaaaagactatccttttttcactgaactgttttgtacctttgccaaaatcagttgtgcatatatgtgtgagtctatgctgttccattgatctacttgtctatctttatgccaataccacactgtcttgattactgcagctttctaacacagcttgcaatcaaatagcatttgtctttcaactttgttctatttttcaaagttaaacatcttaacattattaagtcttccaacgtgtgcccagtgtatatctccccatttatttatgtctccttttatttctctcaagaattttttgcagttctcagagtacgagtcttatacatatcttctcacatttattttgaaatatttcatatttctgaagctattgaaaatagtattgattcttcattgctagtatataaaacagtacatgatttttgtatattaagcttgtgtcctgtcactttgctaaactcaattaataatagttcaggtagcttttttgtgtattcaattggatttttgtttatgttgtctaggcataaagatggctttaccacctcctttctaatctgagtgccttctattaatttttgttttcttactgcaccggttccgatctcttgtaaaatgttgaatagaatggggagagtgggcatttctattttgttcctaaacttaaagaaaagtattaagtttttaccattaacaagaattttagatttttagtagatgcccttatcaggttggctgaaggagttcctttctattcttagtctgctgcagggtttaataagggctggagtttgggttttttaaaaatgctttttctacatctactaagatgatcacattgtttttttgtttttgttttttcatcttttttagtttgacaatattgtgggtaacactgattggtcttcaaatgttttgaaacaatattgtgtttcaaattacttcttacttctgtgacataacctagccttctctctctttttttttttttttttttttgagacagggtcttgctctgttgtccaggctgaagagcagtggcgcgatctccgctcactgcaaggtccacctttccggttcacgccattctcctacctcagcctccctagtagcagggactacaggcgctcgccacttcgcccggcaatttttttttttttttttttttttttgcatttttagtagagacggggtttcaccatgttagccaggatggtctcgatctcctgacttcgtgatccaccggcttcggcttcccaaaatgctgggattacaggtgtgagccactgtgcccggccgacataacctagccttctttgtctgagtgtgtgtgcatgattaaatagatcacagtatcacattctgccaggacccacatggctgcaatgtattcttttaccagcagagtagcacctgaatctgagcaacgcctcagaggcgatggaactgaacaggagtgaatctgcccaggcatgaagtgctcccttacaaaacagtgtgattacagtttgtgttctccggtgtaattacctaggaggatttcttcagtcttccgtaaggaggaagacagtgttccccactactcagagaactgttgtaggtgttcttcctgctttttgaaaaactgagagctgtggccagcctgtcagaacacgtcctcttcttttgggcatattcaggatttgcttactggtctgttcaccctgatagaagttactcttctctgtctgctatatagattaacaccactcactggaacttccatttcccaaaattccaattctgtcttaaaatcttttctaagcacggcttctctctacatatttggtgcacccttcagtgattacaaagatactccaaggtcctgccatgatactgaacaaaattcagatgtagcaaaagtgatcaagaaggcagcaaaggcttatcattgtggggatgtagtacaacctcccagctgtgaagccttgcacacatcactgcatatatctctgcttgacttttctgaacctgaattactcggtgaacagggtaccttgcagtttgaatgaccctcaagctctcagaacttctccaactttaaagcgccctattctaaaagagaactgtatttgttaactccaggggagacaagcttgtcacttcagccttccccttatttaaaaaaggtaatttgtgctgattctccagtacaaagcgcttaagtcaattcgtcatagaaagaccgttaggtgtaaagtgataaatatactatgtcaactttgaaaatgtattagcacttttcaccgtaaaaacttcagatttcacaggtcagcaaagagagtcttttgtttaattgttttgcatcatcaaatatcaatctgtagggtaggggacatctcatttagggaaaaaggtaggcacacctcactttacagaaatttctgctgaagccctaaattagtgcgttggtctcccccataagccttctggcttttagagaacagagactgcttattcttatattaaactggggaaggtgttctatattgcataacctctcagaagtataaatgtgtattgtttctctttatctcgaccttccaagggccccagcagcctgcccaaggcttcactatccttgcaacaatcatggcacggtagtgatgggaagaaaagctgcaggctcagtgctccttgccttcagggaatggtgctgattcctgttgcaaagcagacccattatcagaggcccatcaaatcacaccattcccttccctgctgtctcttaggcctgcaatgacaaagacatggcagaaatgccactatccctgctcctttgctttggccagatgccactgatggatcgttcaattcttccctgcagaatcgtgccctcagatccttctgacagtgtgccagatatccagcatcacctttgcagtttgggaagtggcacccatcatccacccagcgtgcctttcttgattttgtccatggtgctgagattctgcgtggcccccatgcggttgctctcactccatgggtctccatccagggtgatgcacaccctcctaccacctgtgaacatttggtaatatctagaggcgttgctggtttccaccattgggagtgggtgcaactggcatctagtgggaagaggccagggatgatactgcacatcccatgttgcatagaccccatcccacagccaagaatgatcttgttaagtgtcagtagtgctgatggtgcacagacagtgtcccacagcaaagaataatctttttaaatgtcaatagcatcaaggttggggaaccctggtgtgtctgagaaggaaacgtgggattctctctcctctaggattggattctgtcccgtggtactgtctacaatgactgggattttgatacctaaatcttcccttaggaagaaatctttcctcaggaaacttaattatcctgccaatgctcaccagctggagtttgacttcatatttttattggtttcctggaaacctctcattgcattccctcaggcatccacgatacccaaaccatgcacatgagtgacacactgtgtttagcttgcacagcatctcatgccacaaccattcccggcagattcagctcattctcccatcgcagccctgctcccctatgcccggttaccagcaggtctcccaggtgagcctgctgctccaggataaaactgtggccacgagccaacactgaaaactgacacctgcggaagttggctcaagtgctgcctgctaacaaccgaataagtaaacctttgctgcagaacctaccatgtaacaggtgtcttctaatatttctctgatttttctgagcttatcctaagataactttttcacacttcatttgcagagcaggaagacattatgtgtgtgtgtgtgtgtgtgtatacacacacatatatatgagaatatagagagaatatatgtaaaggagaatacatgtaaagagaatatataatatatatagaatatatcctatatatttagaatatatagaatatagttattctatatatagactatagactacattatagtctatatatagactatagactacattatagtctatatatagactagactacattatagtctatatatagactatagactacattatagtctatatatagactatagactacaatatagtcttatatagattatatatagaatatattattttctatatatagactatttttctatatatagtttatatagattatacatagactatattattctatatatagcttatatagattatatatagactatattattctatatatagcttatatagattatatatagactatattattctatatatagcttatatagattatatatagactatattattctatatatagtttatatatattttatataaagtttatatactgtttatatattgtctagactatgttattctacatatagtttatatatagaatgatatagtctgtatattgtcctagcaaactcatagactttattattatttgatatatagtctagtactgatagataatattatcattcaataaaatatatagacatatacaagatacatagtctagactatacatcaaatgataatatagtctttctgtactactatatatagtctatatatagaataataatatagtctatatattgcaaggaggaagataatggctcattttttatccagggtaaaactcataaacatgtattactgagtacagatatcttaatagagacaagaaaattcaaattattggcaaggtactgtacataattgtatccaaaaaaatcaggctattttgcatcctagccaagttactctgcccagtcacaagatcacaaaggccaagttacatgatcactaaaggtggcatgagaggctccgactcatccagggagtaagagagtgaagtcagcagtgggaatgttggagcagctggtctgtgtaaagatgtcctggggaaaaactgggtcaggcttggaagacaaggcaagcggtaccagagaaataagcttgactggaacgaggcagcaacagaggcactgatggaactccgttctagagttatgggaactaaaaggtactccgctcggccagccaccaaatgaaatgggtaaaaagggctgcttgaaatgtaactgggaagatttcataagcatctatctgtatgggtttgcccggactgacataacaaagtgccacagaccgggccgcttaccacagacattgattctctcgcagtcctggaggctggaaatctgagacaaggtgtgagcggggctggttcctcctgaggcctctctcctgggcttggagatgctgtcttctccctgtgttctcccatggtggttcctctctgtgtaggtctatgtcctcatctcctcttcttataaggacaccagtcctgttggattagggcccactctagtgaccttgttttaccttaatccaatcttgtccattctgcagccctagggccacatgcagcccaggacagctttgaatgttgcccaacacaaattcatacttttttaaaacatgagatttatacacggacctgttttttcgctcatcagctattgttagtgtattttatgtttggcccacaacaattcttcttcttccattgtggcccagggaagccaaaagattggactcctttgccttaatcacttctttaaaggccctacctacaaatacagtcacattctgaggtcttgggggctagcacttcagtgtatggtatgggagagggggcctcaactcagctcataacagcatacttctaatggtggttctcagtctttattttgaggaaagtggtcacttaaataatgacatatggaaaagatacaatttaagtaatagagacttcccacgcaaaccccatgtaaggggaggaatcgaacgtatcaagggcattccccaagcccaaggtgatagaggtgagaaatgctcacttattagtgccaatttcaatctcctgatagattttcatttagtatgctgtaaaagaaaatatccctgcagacactggcacttgagggattacagtggtggggagaaattcccttatttatttgtggaattcaatgaagcatttcagagtccaccttctggggataacctgttcattgcaatggagtaaatcaatagccttcatttagattcttaactggcaatttgatctcattcactttaaccagcactcattggctggaggaatgatggagactgggagcaggctcctaaaaagggtcttgaaaatgttatttcaacaaagattaattatgaggcattgagagtttcagaaaggttcacattttttttctaaagctcttctaagccaatcttaaatgaatcctcagaggactatttctgtgggtgtgtgtctgcttgtgtgtgtgtgcatgtgcatgtgtgtgtcttgccccattccagttctccatccccatgctgaggaggctggaggattcagaatgcagaatcaggtgcatttttaaaaaatcattatgtcagtcctcaccaaaacactggctatttctatctttccttctcattttactctgctataggagtctaagtaaatcatctttaggaaataccaaaacctaccaggggttttagattcatggcggccaacacaacctagtattgatagcccatgtaaatgtttgccatccagataacaagaataacgacaagagaaaactaacatgacctgccccatagtgtgctagatccacatctcttggggaatgttttgaagcaagttaatacaagctacttgataaaaggcttccgtgatgaaatgagattggggaagctgagttaaacaaaatcaaacagtgttctgtgttggacacttctcaaatccttaaccatgctgaaaagcttagagtatttccaggagaatagcatagcaccccacatcccagacctgcacagcccctgctcaggccatcttgtgggacaaacagtatgcaaaacacacattctggaacatgcttgagtagaggggaggccactctctaacttgggcacagttctgctctggcacacactgacaaggtgacactgggtgactcatttagtccctctgtaaacggcccttcctcatatgcgagaggccatggaacgttggcctctcagacgttactggctctaacattattttgccaaaaataaaataattagtgtggatgtgttataggaaaggggtctggatacagaccccaagagagggttcttggatctcaccaagaaagaattcaggtcgagtccataaagtgaaagcaagtttatgaagaaagtaaaggaataaaagaatggctactccatagacagagcagccgtgagggctgctgcttgcccatttttatggttatttcttgacgatatgctaaacaaggggtggattattcatacctcccccttttagtccatatatggtaacttcctgatgttgccatggcatttgtaaactgtcatggctctggtgggaaggtagtagtgaggatgactagaggtcactcccgttgtcttcttggttttggtggagttccactggcttctgtgcaacctgttttatcagcaaggtcttcatgacctgtatcttgtgccgacctcctgtctcatcctgtgacttagaatgccttaagtgtctgggaatgcagcccagtaggtctcagcctcattttacccagcctttattcaagatggagttgctcttgttcaaatgtctctgacagatgtaataggtaacgctcagaaactggcatcagaggctatgcaacctgaacagaattggctgacatatatctccgggtataaagaaagtctcagctttcccctgagatgtaatgatgaatgtccctaaagcttccttcacccttccatgctaaactcgctccactgttccatcatctgctttgaagccacaaggacagccagttaggactttgtcatcatcacttttaacttttgtttaacttttaacaaagattggcctttttaaaggctcaattatatttaaaaaaaaaacaaaacaaaacttcctgccacttacgcagtccattcattttaaacaaagttgataatgcaagtcaatgggaaaagaatagtctttttcaacacatggaattggaaaaactggatacctatatggataaaaatgaactttgatcccttactccatactctgcacaagcattaaattaagatcaactgagatttgacctgaacataaaatctaaaattttgaagcttttacaataaagcaaaggtagacaaagactccttctacaaatacctggcactaaacattaaaaaatcataaattgtgcttcatcaaaaatacatctgctcttcaagatagatgaaaaggcaattcactgactttgaaaccaagtatttgtgttcagaatatgtaaaggaattctaaaactcaacataaaaagacaaaaataaaacaaaaacacacgcaaaaaaaaaaaaaatagaaaatgagcaaattatttggacaaaaatctcccaaaaaaggaaatgcaaatagctagcaatcacaggaaaagttgctcgatattattagttatcaaggaaataaaaagtgaaaccatgagatactcctacccattagaatggctacagttaaaacgactgacaatactaagttttgatgaggatgtggagcaattggaatgctcatgtattgaggtgagaatataaaatggtgcaactacttttaataactaccctatggctcaacaattccatttatagatatataccaaaaagttatgaaaacatatattcatccacacaaagacctgtacacagatattcattgtagcattattcatgataacttcaaatggagcagaacccaaatgcttaccaaaggataaatggataaacttactgttacatattcatataacgacatactactaacagataaaaaaaggaataactattgttacctgcaatggaaacatatataaatctcagaaatagtatgttgttaaataggccagataccaaatagaatatgttgcatgattccatttatataaagttctagtagaggcaacatgaaagccatggtaataagaacagcagttgcctgaagttttggggtttggtgatatgaggaaattttctggagtgatggaaatattctttatctttattaggctgatgttttcacaggtgaatatatttgtgtaaactcatcagaatatataaaggatcctacaactcaaaatagaattttaaaaaaccacaaaaagttattgtgatggttaatattgagtgtcaacttgattggattgaaatgatataagtattgctcctgggtgtgtctatgagggtactgtcaaagaagattaatatttgagtcagtagactgggagaggcagccccttcctcaatttgggtgtgcaccatctaatcagctgccagcgtggtaggataaaagcaggcagaggaacgggaaaggactagactggttttgtcttctggcctacatctttctcccagctggatgcttcctgccctcgaaaatcagactccaagttcttcaactctgggactcggacctttgaacacagactgaaggctgcactgtcggcttccttacttttgaggctttgggacttggactgacttcctggatcctcagcttgcagatggcctattgtgggacctcaccttgtgatcacgtgagtcagtgctccttaacaaactcccctttgtatatacatctatcctactacttctgtcactctagagaaccttgacgaatacggttatgcatttttattaatgtaaattatgccttaattaacaataaataccttctcaacctccaaaaagagactttctgtctgaaacttgagaataagtctaaagttttcatttaataatgaatttgtaaaagacaggaaaattgattttggcattaatttgttcaacaaatatctgttgagcatgtcctatgtggcagaggctgagtgtggggtgtggagtgggtgaatgtaaggaacatatagttcctggctccctagagcttattatggtctaggggttggagagaattggtacattgggattttaaagggggtgccaaaagtggtgatgacaaagttcagggaagaacaactggagtggagggagggcatcaacatggatgctgaaccaagccaatgtactgctaagagtgaggtggaaagtatcatgcgaaccccagagcttcaattgtcaatacatactggggtgtgaccagcagattgatagaagacagcaaagagagatgggtaaatgccaatagagcagaatagcatgacttgtcaagagacaggacttttcaaggtgaaaggaagggagatggtcctgaagcagcagtcatgtctgtgacccaaccaagccctaagcgatgacagatagaaacagagtcagggtcctcagaggacaacttagttttaattaaggacagaagttgagaagaatattttaagaaacatttgagggcatattacagtttgctggctatgggttagggtagggtagaagagagagatttggaataaagggtatggatgggacaagacaaagcagggcaccagccctaccttggacctttccttaacttgagaaagtcatgtccatgttgattcagccaatctgactcaggtattatgtaacttgaaattgaaccatcccaactgatataagtggtgatactgagtaacacaaatgtgctttctggattcacacatgcacttttttttacatgaaaagttcaaacttctatgtggagatttttttcaacagtatcctcaagaagtattcatcatgcaactctttctaggaaaggtattttaaaaagaagaaaaatgtcatttctggccccagaatgtcaagacatacatctctgagagatttagttctaattattattgtagagtcttgtgggtgtttcttataattttaatttttacaaaaaacaaatctgtccatccatgcatctatgtatgtatgtatatatgtatgtatctatcttcatcatcatcataattatccatctatgatctatctattgtgtatctatctaataatctacctatgcagaactgcaaaattcacaggactggcccatactgccctctgctccccactttgtctaaacttcaaaatgaagtttctggacacagggctatgaaatgcaaaatgaaacaactcatgtccaaagctctgacactctgctgctcatgaaaacctgcaatatccaactgagtttttcatttttaacatcagcaggtctagttctctatcttcatagagagttatttttaattttattaggggataaattcttttttaataaagaaattattaggtatcaaaataccacaatctctttatggatccaactagattatgtgtatgggcaaagtattttcaacttaagaataacattcctgttccttgaatactattttgaaagtttggattaagggatattaacttccttaagacaaaacagactcacagttgaaaactactcaccttgtatatagaagttgcttaattaatatcaatgatttttattgaattggaacaaaatagactataactttttataagatacatatgggtttgttactaaatattattaaaatgaatgtaatgcaataatattcttattttgaggtaatacatatatagtctgcaaaaattaggtttcctggtgtcattaaccacttatgcaattatttttctgaaatgaatacacatgctgtacgtgcagttttgcctgatataagttttaaaacaacgtatattggaatcttggaactaaaaatgagaaaatcagtgtccccttgatgtcaatttcagtttcaactacacttgctattttatttttaatcagttacttacattatctccacattgtcacagttgatggtatttgttttcttctctgtgaccataatttgcacagatttaaccataatgcatcgttaaagattacaagaaatcttttagacacagctcctctcagttgctgagagtccaacctttactcatttgttttcttcatgaatatatatttcctgagttgtatgtttgtacatagctatttgtagcctttgaagtttatggaagtttgtttggttgcattcttggggcacattttctttccctgaggactgttaaggttaggatatttgaccctttcaaagctcatgttgaaatttagtccccaatattggaggctgggcctaatagaaggtgtttgggtcatggggacagagccctcccattgaataggttaatgtcctctcctgatggtgaatgaattcttcctctattagttcctgcaagacctgcttcttaaaagagtgggccacctcccggtttctctcttgcttcctctctcatgtaatctctgcacatgctggcttcccctcctcttctgccatgagtgggagcaggctgtggccatcaccagatgaagatgcccaattttgaactttccagccaccagaatcataagccaaatcatctcttttcctttataaattatgcagcctcgggtattctttatagcaacacaaaagggacaaggactttttatatcttgccccactgtcttctagcatttcatctgtcacataaagaaatattagcctcctaggtttttttttctgaatatccacagaattctttccataacttcaaataccaggaatttattggggtatttgttaattattcaatataaacacagccttgtaattcttgggctatttctgtctgcagattcaaatttcattgtatttcaggaatttcaccttgaattgtatctttgaaaatttgttttcatgttccattcattttttaacccatgcaaggcatttagtgttaaagatatttgatctcttccctaccacccctcccatccccctctttttctctatctctgtcttccgtcttttactttttgttcttttccatctcacttgctcattttttcttctcaaaaccatcctttgaattccttcagtagtgtctcatctcccttttgctgcttctatcatgacctttgattttggtctctttttgtgtctctctctctgagattctgaggctctgcctattctgtttttattctcatttgtttctaatttgtttccaagactctgtctactcccttttcattctcatttattcctaatttatttctgaggctttacccactcacttttcattcccgtttaacctaatgtattatcagttcttccttaaagccttatattgcgtctttaaattctcatttcagagaaacaatattgtctttaattgattccttagaaataactttgttcatggtttttggctccattgtggtatataatctttccaggtgttatcgtcataaatcatgttctgtcctttttttttcatttcagcatcattttaaaggcccccagctggctctaccctttttaagtagcattgttcctcatctttttaaactagaattttgggcaaagttctggtgaaaggggaagaggaatgtgccaaacaaatgggaagattgggtttcaatctgttatctctaggatttttctcagctggacttggcctgtgggttatctggtccagcatagcaggacatcttctgggctcacaaggaggctgtgcattttacagaacattttaacgtgattattttaccttgacttatcttcaccaggcagctttgggcaaagacggccaggtagcttttatcttattgactcttccttctatcctatgccatgattgaaacatgatgtaggcttccaaaaccaggccatgaaccttgatcttaactttctaagcatgggatagacacatttcctttcaatgtgtgccactcatccactttggataactacgagctgagtccactctgcctgagtcacacatagaaagacatcttctcttggatttcccaaatacctccatccacttctcatacacttggctatcttcctgcatctactgtgatccagggttataggggacctgtagcttcatcaaagataacatttgtttgtttcttcttctcttgtttgctttggattggtttcataaaggaaatcagacaaaaatatacttacactaccatttgaaaagaaaagataaattccttctttcaaattcattcctttttgtttctttccaatgaatctcatggggtgagggggggactgaagagaatgtccaatctagtcaaatccaaaaagtcacaggtataaggcacagaaaattttaccagtctaatgatggcagttttaatgctgtataaggacagactatgcaaaaatgctattaatgaggatgaggagctacaggaagaaacctgatgaggaactgtaattctattagagggatgtatagagccatcatttttttctttaatccaaaacaattagattgcttatatcgacagccacactgaattctaagctatttgtttgaaatgcaccagaggatgcagatatatatatatccttttaccttaatttaaattttattctttccctcccgttttatctgtgctatagagtatatttttcccacttgagctcaacatgctgttgtgcagaaagccttctcttgggaattcccaaaatgttggcccagatgagtgcagcagacatttggcctaggtgagcctagcagatatttacatgaaatattagggagcatccatctgggctatgtgacttaggctggcaatacacgaaagaggattccaatttgttgtataaatcaccctcagagcccccaacagtgaacacatagggggttcttttcattttcatgatgcttaatataatctttaaaaataattaaaattaggtgaagtgtgtagatttctgagagattacagaaagacattagttttgatacctcttgcttgtagcatttgaccaacataaacaaacgaaaaggtttaaaaagaacagggattcttcccagtagtatagtgcaatgggtaggggaaaaaagttcaaaattgatacatagaccaatattattctcaaaactcataccattgtgattgggaagaaatgaatacatgttacttagtcacttcatgttactatatacttatattaaaacaacaaaaaggaaattataggaaaaaaagtcatacatttaaaggatggaagaaaatcctaggtttactcagagctcaagatcccattgggatgaatattgttctttccttggattgttccttcatttcattcattcacttatgtatgcatttatttatttagagatggggtctatttctgtatttatttatttacttatttatggagtgttactctgttgcccaggctggagtatagtggcacaatcatagctcactgcagccttgaactcctaggctcaagtgatgctcctgcatcagcctcctgagtagctgggactacaggtgtttgccaccatgccccactaatatttaagtttttttgtattgattgggtctccctatgttgcccaggctggccttaaacttttcagctcagcgatcttctgccctggcctcccaaagtgctaggattacaggtgtgtcccttcatttctaatgaaggaaggttttcctttgaatatctcacaacagatatttttaaaagaaaggcagatttgaagcaaccatcaacaaggtttacttgaaaattaatgatatttacaagtgcattatataacagaaatgttacagactgaattgtgccacacctaccccaaaactcttatgttgaaatccttacacccagtaccgggaatgattgtatttggagatgggtcattaaggaggaaattaaagtaaaatgaggtcacatgggtgggccctaatccaataggactggtgtccttctaagaagaggagatgaggacacagacacacacagagagatgaccctgtgaggatgcagggagaagacaccatctacaagcccaggagaggggcctcaggaggcaccatccctgctgacaccttgatctcagacctctagcttctagaactgtaagaacaatttctgctgtttaagcattcccatatgtgggactttgttatggctgcctgagcagcctaatgggagtgcaaagactttctttaaataatgtataacaatgttggtttggaaatgactatccagtgttgagttcaaaactttatctttatgggtgctgctatgagtgagtgtctaatttgggggcataatagtgacattcttcgggagaaatgcagactccaatcagtgcagaaaatggcacagaataatgtttaaaaatgccctccaggccataacatggttgggttaggaggaggaatactaaccattccaatcgtaaaacagagaattttgggtttctttcatgagttcatcacctctgaccttcacaggtaagggaccatcacacagacatctgccattttcatataactctctatccaaacaaaggctgaaaattcagcatggaggaactctcccagcacccgtggtcagccccttggcctgcaaccccaccctgggcactggtgtgggggtgggattctttatgaacttgggccccaattctgcttcccctggaaagctggacccacacaacatcaccttcatatgcagaccctcatgtgtgggcacctgtgcctcctcggagctggcggtcagctctagaagctggttcaggacaggatactcccatccaatctgtgcccaccatagaaaagagtcagccaagtgcctgctaccacagggctcttcacacatggaaaagctgccctgtggaagtgtcccaggaaaggtcagggggacaaaaaaaggtcacagtgatttgcctccagacactggacactcttccctggagagtacagggcatgctgctctccaaacctgatcttgctacatttgtgctgcccacagtaggggtgtcactgagttttcaaagaagacagcaggacctgaattgtgcaaggaaaataagtgcttgaattttgtagcatgcgtgcagtgttctactttttagaatgctactgggctcctctggtattcaagaaaggcccccaacagctcagatggtagttttctaatcctgtcttcccatatgcacatttacctcctccacccaagaactgaataacagacatgagtgctcgggacatcatgctgtctactgtcatccccttcctgagaccccctctccaaatctcttgacaaccctcttcttagctccctctttctttctggcctgttacactcaacctctccaacgtcctatcaagtacctgctcaaacctacttcctctcctgctgtgcttcttcttcaaaagtgttttgcttcccatcctccccttctttccttgccctcttccctgcttccgtcttccaagcacttctcaactacaaatgagaaggaagcgatctgattaaacaggtgatgagcagagtcatgttctgaggtgatttgcatttttaaaaggagattaatgaccacatctgacaatgtcaccctgaaatcttatgcagggtgacaggggagtggggatgaactccgttcagggcaggaagccagagtttggatctgaagtacttttcagatgctgaagtcataggagcttgcagttacttcctgggtggagccataaacaaacatctcttctgctgagtggggtctgagaagatagagggaatggtgacccaggagctctggaattatctgtctgtgttacacttgcaggactacacaaatttaactgaaaaaaccatgcttttcatccacctggctgaactcttagcctgctctcctcttattgttccctcgaaggcatcattttttgaaagagaaatttaaactctgtccatctcatcccctttggaagaacgttaagattcctttctgagctttttcatcatctggagtttaaaagcttcccctcctctgtcaactctctttgaatccctcatgtcacaccaaacttcaaaagagacaaatacttttgcatgactccctgcaggctctgttttgccctgtagtgacagccccacgtcttggctttcctgattggaaaaacttctcaagctttctacattcatgatctgcacttcttcagtgcagccttctccagtttgtctctgatctccaatggtccctgcattaatcctgtccaagccacaggtgaccctcatatcatctcagcttctacttcccagtctctcactctcttttttttttttttttttttttttttttgagacaggggtctcactctgttgcccaggttggtctcaaactgctgggctcaaaagatccttcaccctcatcttcctgagtagctggtaggggtgtgagcccttctgcttggtctccagtcctttgcttttcttttttgacctacacaacattcggtggttgacgtccatgttcatgtaattgtcttctctggcttctcagggccaccatgcattcccttctccctcttttcatttattatcttttcatctggtaagacccatcttcccctaaagatgtatattttcctcaaagcaaggattggcttaccttcacaaactgagtctccaatgaccacataaactgaaatgcaatagaaatcatggacagatgtgagctcttcttctaattcctgtgtcctctgctggttcttctcaccaacatcacgtactgctaagtaagcgagtgatgttaagttagaaaatggactgagtccagtaattcatttgtcatgctccaaaatccttacctgagatctatctactctccaaattatgctcgttagaaatacaggaagatccttttcacatgagctaattagggtgaatacatgtaagtgttggtaagaagtactagaaacactggaatttgtgagatttcattgaagaaccaacttccacccagcccttcacattgttctcttttggtagtttcttgtcatttcctccttttattatcaatagagctgctgtgaacatgcatgtacaagtttctgggtggacatatgttttcattttttggggggtgggtagacatgaaagagtagaattgctgagttatatgatgaatctgtgttctaacttttcagaaactggacttctactccttcctgatttcaccttccacgccatttctgtagtgaggcccactccttggccttacaagacctgaattaagttaggtgcccagagccgttctgtcattgactctgttctttcccttgctagcctgtgtaataattggcaatcagaccttcacgtgagcaatggtttcatatgtctccccaactatattacaagttccacgggggcagagctatgtctatctccttgacctctgtatctgccatgcctggcagagggctgtgaacaccggtcaccctccataaacactgggagacaaacaagggagtcagtagagttagttttttgcttttttacccccagaactcttagaatatgatttgagcttttccttcaacgaagtcctggggcaggtgatcattcatagatgacatgagggagtgcacagcacatgagtttgcaggaaaatgtaaaccccacgttgatatttgatccccaatgttggagatggggatttacggggagtgtttgggtcatgggggcagatccctcatgaatggcttggtgctgccctcatggtaatgagtgggttctctattcaatcctgcaagagctgattgttagaaagagcctggcaccttcctctcctctttctcttgctgcttctctcaccatgtcatctgtgcacacaacagctccccttcccattccaccatgagtggaagctccctgaggcctcaccagaagcagatgctggtgcaatgcttcttgtacagcctgcagaactgtgagccaaataaaccttttctttataaattatccagcctcactcaggtattcctttatagcaatgcaaaactgactaagacagggtatcaggagacctagctttgcctgcatctgagaacttcatcaggactcttggaactatttagcccacagttccaaggttgatttttgtcacagtaaagttcaggtagtaagaattctcactggtggctgttgagggtggtggtggtggggatgggtcatatggagaattagcagtgggagactagaaattaaagtggataaagggaagaattaaaagtcaaaaacagtgtgagggaggaaagcaatggatataacacctcagatctttatcctcgagaggccttaaaaaatctacttaataataatcagatgctattctacaagtactttgagactagacatgtgatgacttgtaggagcctgcactggggctgaaaatgcatgcaaatctagctgactcagctccagtcttaactggctcataacttccttcataaacatgactgtatgtcagcaaggaaatgagagagaataacagcacatcacataggcatgaaaagtatttgcaaagcagaagttcccaaaaatgacattttgcagtgttttccagaagcagattcagaaaactgaagaccaaagtaatgagggagccctatcatgcctagatgagcagaagcataccaaaggcttagtatttccccaagtagtaggcacctcaaacttgtttaaggaaaatactcttcttgatgaaacagatactgcagttgaagcaggaatgtgtttggtgtgctgccttaaatagcatgggtagatgttcaaacatgttaggactcactggccctaggaaagacccgcaagtatctggtctacaccaagaaagtgacaatgtaacaccaaacaccttttctcctctaattaccaagaaaagtatttctttcccaatggtggaagacaataatgttgggaatgatgaagttttctggagtgtgaagtggatatgtcttataagtttaattcacagcttcaccacttcataagtggataatcgaattgtgcctcagtttcctcagacttggggatattaagagtaccctcagtcaccacaaggtgggtaccaacataagaaaagggtatagcaaaatcccaggggcacatgttcttaaagtgcctagtgtgggattagaatgacaagtggtagatgacctacttgtgcagaaatttagagttattttgtgattttcaaatgatcatgtgtgctttccatatgctgtccagactgggggtgctggagctagaaagggaagaaggtttccatatttcctgagactggagtcacatcctctcaccaatgcactcacctgctgactaaccagtgtacttctgggaattgcaaatgcatgaaatggcacccattctagactagtcacggcagtgttggtgatggccacagaccaggaacgaccctgatgtttatccgtagggaactaggtcatgagccatgatcctcatcatggatactgggcagctgtggcaaagaatgaggtatccttctgtctgtgcaccgggaaaggtttccaagatacaccacacagtgagaaaaacaagaagcagaacaatgcacggtgtgctacctcttacattacaaaggaggaaatgtaaaattaatttacaaatggccaataagcacatgaaaacatgctcaacatcactaatcattaggaaaataaaaatcacaactacagtgagataccaccttacatccattacaatggttgttctcaaaaaagaagagaaaaacagaaaagaaaagtgttggcgaagaggaattggaacgcttgtgtagtgtttgtgggtatgtaatatggtgcaaccactgtggtcgtttctcaaaaaattaatcatagacttaccacaagatgcagcaattcggcttctggtgtattccaaaaagaatggaaagcaggggccccagcagatatttgcatgtctttgttcatagcagcattattcacaatagctaaaagttggaaacaagcccagtgtccatccatctgtgaatgaataaacaaaacgtggtctatacatacaaacgaatgggattcagccataacaggaagggtggttctgatgcgtgcttcaacgtgaataagtcttgagctctttctgctaagtgaaataaccagactcaaaaagacaaatattgcatgattccacttaacagaggtgcctaacgtcatgaaatgcatagacagaaaatgaaaaggtggttgtcagtggctggagggagggagaaagaggagttggtgtttaatgggtacagaattccagttggggaatatgaaaaagttctgggtggggatggacagtggtggtggttgaacaacaacctaaatgtacttcctgccactggatgtacacttaaaagtggttaaaatgggccaggcgaggtggctcacgtctaatcccagcactttgggaggtcgaggcaggcagatcacgaggtcaggagatcgagaccatcctggctaacatgatgaaatcccctctctactaaaaatagaaaaaattagccgggtgtggtggcatgcacctgtagtcccagctactcaggaggctgaaacaggagaatcggttgaacccaggaggtgaaggttgcagtgagctgagatcaccccattgcattccaggctgggtgacagaacgaggccccttctcaaaaaaaaaaaaaaaaaagaaagaaaagaaaagaaaaaaagtggtcaaaatgttgaattctatgttatatatattttaccataatttgcaataattcctattgttttgcataaaacagctgtagaaagctttgcaggtcatgaacagcatagctggccactgaggctggtgtggggctaggacctgggtgcacagggaacaggtatgagacacaggctcttcatgcctgcacacatatacggatacacacagatgcaaatttctgagccatctaaatacaacacctattcaaaaaattaaacagaaaaaggaaatgtaatggagctaaaggataagggtaggtgggcggctgctcaggaggactgtggaggccacatcacccaaactttgaggcctctcttagcagctggagtgcatcccggagacttgggaactctggaaagaggagcaggagagggccatggccagaggaggcctgaaaaagatcatctctgacacagagaagaagctggctcggatgctggtggccactgtggagacaggtagacccagggagacaactgtatgcattcaaggaggaatgggtggtgatgcaaacctaggtggaggccacagggtgcagaagacaggacacaacagagagagatgtaggacatggaaaggacagaaaggagtgatcaccggacgtaaaggggcaaggaaagtggaagcatgagagcatctgctgggcatctggctgaggggtcatgtgcccagggtgcccttccctaagggagaacccaggacaggagcagattcagaaaaaacctcccagctcactccagcaagaagcagaaaagggactggttaaaggacagggtaggaaggtcaccaagctccaagggccctcatgaagccagcttggaggccacagggcccagggcaaggaccaaaccacaggcacaggacagctctggtcaagaccttctggctaccgcaggaggcagaaaccacaccctgcaccctgcactgctgaggctggccctggggtccagaagcttctacaccagaagcttctgtccccgatccccactgaaaaaattaaaacaaaaacaaaaagcaaatcggtgccatgcaccctctgcttcctggtgctgttcaggatcctgagtctttcacgggagcacctaatggggaaagcctggacccgtgtcggtgtccctcctgcaaggagtgctgggaaaatgaactttccggcttcctccttgggaaagaagaacattccccatgtgtactggtggcatttaaaaactgcagggcagccagagaacatgcaccgtgttccaccaggagagtttccagcgggatgtcccggtgaagatgcccgtcccaaggtgggtatttgagctgaggaactgagaagctgttttctgcctagagttagagatccgagaggcatcagcacatggaagggagggaagctatgatgcctccagggtgggagatcagatgaaccaggagaggcagggcccgggaggaaccccggggagcagccgcctttaaagcctgggggaagtagcttcagagaaggtggggcaggttgggtggggggtgctggaaaaatataattaagaaagaaatttctgctcatcccagaaacccccatcacatccgtagacgtaaaagaaacctgtcttatgattaagcattaagccaaaatgtgatgcaatctgctgagagatgacaaagtcagaaataaatcccactttggatccagccaagcaggtgcaacccgttacacacatggtctccagatagacggtgactagtttccagttgaaaggactcaatggcaccatttgtcacacatagttcatcctaaattcacccagtaagtgggttgattctctgtgtggttaattggctttatctacaggaaaaacaaacctcttatctatgacaggaggtagttttgcaactgggagtgagatgccccaagaactgaggttccttccttctcacagaaactgggagacaggggcgccttctgcccggatgcctgcctttcaaagagaggtctcctatggccttgaggaggacagttctgggttggcaggcaagatgtttatgtatgctttagaaagctttacatacatcttcaagggctagagaaagaattttcaattacctcttctaaaaaataaatgctctcaaagtccagcctaggctgcatagcaagatccaatctccacacacacaataataataatcaatttgctgggcatagtggggtgtgcgtgtagtcccagctactcaggaggctaaggagggaggatcacctgagcccaggaagttaaggctgcagtaagcttggatggcaccactgcactccagcctgggtgacagagggagactctgtcaatgaatgaatgaatgaataaatgaataaatgaatgaatagaaaatgctctgagcgaaaagaggagagtctctttatctttttgcaacaggctaaacaaaatttttaaaaatgtatatttgcctcacagagattattccaggaaaagaaatggccctcagtgtcaaaggatgcaaaactaacctgtgagttcctggcaggtttagcaataaaggaggatgttgctgatctcagtacaagcaatgttagagaaaggggaagatggaagtggacgaggaccagtgagtggaaggtgacaaatggaagcaaagaaacccatccagaccattgaagatgcttgagcgagaagaaagaggcggtggagggaatggaagcccgaggaagtcatttgttgcaataggatgcctcagagcacgtgtagggtgcggggcagagcccatgcagaggggctgtggaaggctggcagggtgcaggtggccccactctccgtcaccctgaggaatatgtggtcagagttaaagctcagtctgtttctgggatcaggtaagaggtgagcgtccggagaagacaggcggatcttcagatcctgcagacctccaccgcgccctctgtccctcttgactgctttttctccatctccattgtctggctcacattcgtgtcactttttcatttctccctacccctcttttctcttttctcctctctttttcttaacccttatacctttggaagtcccactaatagaatttaaacagcttttcaagttggttttttgttcccagaaattgactttagactctccatgaataatgtggaaatcaaacgagtataagctgattcacgtctctgcaaatgaacaaataaagtctacattccaatgctttctttttccagagtagcccacatttgatttttttttttttaattactgtcacttgcaatagatttttaaatcttgtaacctggttacacaaataccatggggccaaagacttacttcctgtaagaggaaaccaggcttgactagcctcatgctggctttgaagaagtaaaatcaggggttgatgaatttgcatagggtaaatatcaaagatcgaaagtcaacaataggtggtagagggaataccccaaattataaaaaaagaaactgtttaagccacaatagaattatcgtagaaataaaccatggtccttcctgctaaaatattccacttagaattgtaaaatattcttctcaataactcctgaaagagcctattaagaaattaatgaggctgggcatggtggctcacacctctaattccagcacttttggaggctgagacgggtggatcacttgaggttaggagtttgagaccagcctggccaatatggtgaaaccccgtctcaactaaaaatacaaaaattacccaggcatggtggcaggcacttgtaatcccaactactcgggaggctgaggcaagagaattgcttgaacccaggaagtggaggttgcagtgagccaagatggcagcactgcactccatcctggatgacagagttaaactccatctcaaccaaaaaaaaaaaaagaaaaagaaaagaaactaacaaatgtaagagtgtctatgttccaaatccggtgtattattttatgcagcctttcacaagctctaaaagattcactgtgcagaactggaggttctagagaaagaccacgcctcctcctacaggtaactcttgattcaggaagcagctcttggcttatccctgggcttagtggaattcaaatacctgaccataggacaccaagggctttgggacctgaaaggcacatcatgtcctggtgacatctgagttacctggggcatgcacagccagcctccagcatcccagggagagctgtgtatggggtcaggctcaagcaggtcccagggcaccagtgacccaatgggtgactcagactcccatggcacctgctccttctgtttctccctccaccatatatatgagctcatgggaaacactgtgtgacctcttacagaggaggaaagtgcatggacttccagtttctagaactgtgatacaataaactcctgttgcttatctactcctctacagtattttgtcatggcagccctagcaaactactacagggactgtgagggttaagatgacaccaaacatcaaatgccactccctgttccaacactgagaccattccacagcctctgaatgacaagacaggccttcaaaatcaagaccacctggctaggtaagaagtactttagtcacaccacttctgaactttctcgcctacctgcagggcaggaatttttaccattttcaaatgaggacactgaagcccagagaagtagtgctatttcctgatggataagaggtgatatatttcagtcctcagaccaactctgaagtagcaagcttctagtcttaagagtcaaacttggctgggcatgatggttcaagcctgtaatcccagcaatttggtaggccgaggcgggtggatcacctgaggtcaggagttcgagaccagcctggccaacatggtgaaaccctgtctctactaaaaatacaaaatttagccgggtgtggtggtgtgtgcctgtaatcccagctacttgggaggctgaggcaggagaatcacttgaacccaggaggcagaagttgcagtgagctgagattgtgccattgcactccagcctgggggacaagagcgagacttcatctcaaaaaaaaaaaaaaaaaaaaaaaagagaatcaaccttgagccaggcacggtggctcatgcctgtaatctcagcactttgggatgccgatgaagtcaggagtttgagaccagctgggcaacatgctaataccctgtctctaccaaaaatttaaaaattagctgggtatggtggctcatgcctgtaatcccagctatttgggaggctgaggcacaaggatggcatgaacccaataggtggagcttgcagtgagccaagattgtgccattgcactccagtctggagtgcaaaaaaaaaaaaaatccatctcaaaaaacaacacaaaaagaataaatatgtggcttcatgactgtatattactgggcttctgacctagactaaaagatcagggaagagtttcctgaagagaaagtgagctatgatgggcccactgtactccagcctgggcaacgtaatgaggctctgtctcaagaaaaacatgcagaataaaaccacaaaaagataccactacagaactattagaatggctaagattaaaaagagtgaccacgccaagtgttggcaaggatgtggaggcactggaatgttcatgctgctggtgggaatgtaagatggtacaactgctatggaaagcagtctggcagcctctaaaaatttcagcatacacccaccatgcaactcggcaattccattgcattcccacattttttttagttaaaggaaaatcaagtgtaatgatctttaaagcatttttgcctgacaaatagatgaaatgtgggtagtagcccaacactccctggtcagtctatacagggcatatgtggcctcatggcccccaggaaatatggctgtttccacaagtgctgagtccactctctccatcaatcctaagatgttagttccacagcactgccagcattgggctttgtctatttctttctttgtcatttttgagagggggtctttctctgtcacccaggctgaagtgcagtgatgcaatgttggttgtaatggctcccatttcatttctaattgatcttatttggctcttctctcctcttttcttggttaatcttgccaatggtctatcaattttatttatttttcccaaaaatcagctttacattttatttatattttgtattattttgtttcaatttcatttagttctactctgatgttggttattttctttcttctgctgggtttgggtttggtgtgttcttgtttcttgagtttctagaaatgtaaccttagattgtctatttctgctctttcaggctttttgatgtaggcatttaaggctataaacttttagcatgctctttgctgtattccagagattttgatagggtgcatcactattgttcagttagaagaatttttaaatttccatcttgatttcatatttgacccaatgatcattcaggagcaagttatttaatttccatgtgtttgcatggttttgaaggttccttttggagttgatttccagttttattctactgttgtttgagagagtacttcatataattttaattttcttaaatgtattgagacttgttttgtggcctatcatgtggcctatcttgaagaaagttccatgtgctgatgaatagaatgtatattttgtggttgttgggtagaatattctgtaaatatctcttaagtctatttgctctagggcatagtttaaatccattgtttcttccttgactttctgtcttgatgacctgtctagtgctgtcagtggagtactgaagtccctcacaattattgtgttactgtctatctcatttcttaggtctagtagtaatagctatataaatttgggagctccagtgttaggtgcacatatatttaggattgtgatattttcctgttggacaagtccttttattattatataatgtccctctttgtcttttttaagtgctgttgctttaaagttagtttttttgatataagaatagttactcctgctcacttttgtggccatttgcatggggtgtctttttctacccttttaccttaagttcatgtgacactttatggttaggggagtctcttgagggcagcagatacttgcttggtgaattattatcaattctgcaattctgtatcttttaagtggagcatttaggccacttacattcaatgttagtattgagatgtgaggtactgtcccattcatcctgctatttgttgcctgaataccttggttttattcatttatttattgtatttttgttttataggtcctgtgagattcatgctcaaagaggttctgttttgatgtgtttccaggatttgtttcaagatttggagctccttttagcagttattgtagtgctggcttggtagtggcaaattctctgagcatttgtttgtctgaaaaagactgttatctttcctttatttatggactttagttttgctggatacaaaattcttgactgttaatttttttttttttttttttttttttctgagacggagtcttgctctgtcacccaggctggagtgcagtggtgggatctcagctcactgcaacctctgcctcctggattcacaccattctcctgcctcagcctcctgagtagctgggactacaggagcctgccaccaggcccggctaattgtttttgtatttttagtaaagacggggtttcaccatgttagccaggatggtctcgatctcctgaccttgtgatccgcccacctcagcctcccaaagtgctgggactacagaagtgagccaccgcgcctggcctgataattatttttttaaggaggcagcagatgggtatgcatgctcattcaggtgttcttcccttattgaagattagtaacatcacatgtgttgaaaagcatttgggattatttacttaattgatgagtactcatttatttttatgttaatttgataccacatataaacaatatattaacataggtaggggcatatacatatgtgatatgtgatacaacatagaacatatacatgtgcacataaagatagagggagacagaaacacttcagattttttattttaaaactttatgcatgaacccaaaaaactcactgttaaaaaaaagacagctggatttaaattgtgcttttgtaaatagaaaaagataacatttatctgaggaagtccttgctgagttttagagaaagtaggtagtaaatttacatctcaaagcacacacacacccccacacacacagagagagagagagagagaaggaatttgggtgtgttcaaggaagattaaaagtagatgccaaggtaacacaaaaatgatagaaatttataacagcattttataaggagaccagttttatttacatacatagcttttattttggtctctgttttccaactgtactccaggaaacacactacacaggctccctttttaagtgctggtgggccaatgcacatgcagacagcccactttaagggaagaatcaggggagaagagatgcagaccccagaattacgccaacataaaaaacctaagtcaaaggtcaaacccacacttgaaatctcatcgcctgtttcaccctgttttcagtgtactttactttctttaatttctgctctaaagcttttaaataaactttcactcttgctctaaaatttgcctatgtctcttcttctgccttatgatgcttagttgaattctttcttctgaagaagcaagaattgaggctgctgcagacttgtatagatttgctgccattaatatactttagtgccattctacatgatagaatatatatactcttatatttatacatatatatatgtaaaatatgtattcatagaggccttgaatctacattcttgctgcagtttatgtaaacaatccaggtataagactaaaacttattttggaaatacattggtcccatatgatttctgtttcataaaaatgggagacaggagggggaaaattatttttcagaagaaaacaacaaaacaacggctattaaatttgttcattttttttttaattttgttatttacctacaatttggactgaatcctaaattttttcctggctacaaatttcaaaactaatggtttcagaattttctcccatttttcttccattttggtatattataaattaaaactgtgctttttaaatttttatcttttttttattacacttttaagttctgggatacatgtgcagaacctgcaggtttgttacataggtatacacgtgccatggtgttttgctgcacccattaacccatcatctacattaggtatttctcctaatgctataactcccctggtcccccacccctcaacaggtcccagtgtgtgatattcccctccctgtgtccatgtgttctcattgttcaactcccacttatgagtgagtacatgcagtgtttggttttctgttcctgtgttagtttgctgagaatggtggtttccagcttcatccatgtccctgcaaaggatatgaactcatccttttttatggctgcattgaattccatggtgtatatgtaccacattttctttatccagtctatcattgataggcatttgggttggttccaagtctttgctattgtgaatagtgcagcaataaacatatgtgtgcatgtgtctttatagtagagtgacctataatcctttgggtatatacccagtaatgggattactgggtcaaatggtatttcttgttctagttccttgaggaatcaccacactgtctttcacaatggttgaactaatttacactcccatcaacagtgtaaaagcgttcctatttctccacatcctctccagcatctgttatttcctgaccttttaatgatcaccattctaactggcatgagatggtatctcattgtggttttgatttgcatttctctaatgaccagtgatgatgagctttttttcgtatgttttttggtcacataaatttcttattttgagaagtgtctgttcatgtgctttgcccactttttgatgggcttgtttggtttttttccttgtaaatttgtttaagtttcttgtagattctggatattagccttctgtcagatggatagattaaagcttgcaagctgaaactcaacaacttatgtaaacttctggagaaatcacagcaacttacatataaacaacccttgtgcctgctgatgtgtggactacagaaaaggtacacatgaacactgtattcagactgcaatttagagaaatgtgtcagattaccactgcaattggaagatgcttcagaaactctagaaaacctagtctatagactgctccagacattacaggtgagccaagatacaactgaaagggttagagtggtgtttgctaaacgaattgctctaattgaagcagcagttgtgtgactttaataaggttccaggattatactgtccctttgttgctgtgacttccctttgcccttttctgatttgtctttatcccttttccatgggacatgacttcttaagaatgagccttcctagtgatgcaggatcagatgaaacttacagtcacaaagtcatgtcttctacaatgttttgtctgaaagcttttgaagaattggggggccagctgtgctggcacaggcctgtaatcccagcacgttgagagtccaaggcaggaggatcacttgaaaccaggagtttaagaccagcctgagcaacaaagggagaccatgtctctgcaaaacataaaataaatcaaattagccaggtgcagttgtgcatgcttctagtctcagatacttgggaggctaaggcgggaggaccgcttcagcccaggagttcaaggctgtagtgagtacactccagtctgggtgacagagcaaggttgtgtctctaaaagaaaaaaaaaaaaagaaaagaaaaagaaaaagaacggggtaaacaggaaagccaaaaatcttgggcatctccagatgattgcctgaacgaattgttttttcttggcttcaaaacctttcaagatgtatatatctttgtaaaagaaagacatgccaattgtaactttaagtgagcaatcaaaatctagctcctaaaactgaagtattttaactctcattctgataatatttattttctgaggcacagaagaaagacaagattagattaattgtttttctgcccactccatctcttccgacctgccttctcccctttaatcaaatgtataaatactaagcctcctgaaatctcttcagagaaaacacaagccacagagattttttgcaactcatgttttcccagggttcactctcaagctctggctcaataaaactcaattggtcaagacccttgcctcagtcagtctttctggatatccaccatgagtcctgcaaagcccttcagtaatctattgcctgcctaggtgatgtgtacccaggtgagtcaggtcttcatgagtcaaacactcgtcttccttttctgtctttcccaaccctaccactcagtgctgtgtgctctgatctgaccccagctcccaggttgtttgtattggtctaagaaagcaagaccaggaggggcaggttgagaaggaagtaagaggccaacagccatggaaagtggcacgtggggctgtcattcctcaaaaccacataccctgggtgcattttgtgaatttttctggattcagaatcttttccctgtgtgtctatctagaaaatcaccctcctcctactttcctctcattacactttctgtttctggtgcaatcgtttatgtccagagaatggccatgcaaatagttgacaatagaataaaaaatgactttttgtgagatttggaacctggcctttcttttttccaaaagagattgaggtttctaaaagctagcttttatgcagggctgtgcagttgtgagtgtagttttagggaacaggtgcataagtgaagggtgagacagaaaacaaaatgctggctgtttgtcaaatcctgaaaataatttttgaaggtggatgtcattcaggagaccttgtaaatcttagagtgtcctcttaccagatgaagtggaggatgaggttgaattatggagttaggtgacagtgggtacatacttctctgcctcagtttttttttttaatctgtaaaaatggggatggaggcacttgggattttttgtgaggagtgtagttacctggaaagctcttacgatagtgcctcgtgcatagtgagtgctgcattagtgtgagctattataattatgggaatagacaaaggtgccaccctggccatccagagtggggaggtattttccagtcagggtccaggcaggccagctggagatgaagctgattagtggggaagcttaacttccaggagtggaagaatttaggaggagtaaacagaatgcacaacattctgtaaacatgcctttacccaacagtaggaatactcagagtgggtgtgtcttccgtggcaatcattatctcctgggaatctaagaatgtgtcctagagtcaaatggctttgatgtaagccaaacccagaaatggacttcagggctgcctggcacatagcattcattcatcttgaaaaaggaaagcattcatcttgctaaaggaatcccctcttctggcccaggccattatttttgtttttgtactatcctaatttttaagatgtaaggagaaagaccgaagaataaaataatgaggtacatgtatgaaataacagggtagaattgagactggtacgtgtaagttaagagaaattgtgtataaattttgtgtgaacagaaaaaggatttcttgttgcaaacagacctctccatataaataatacccattgccttgagtggatagcagacggcatcacaagaatattccagcagagtcatgagagaatgggtagtgtggcttctttaattggcaggttagactgagtaagttactgaagagaaaggagttgaaggagaagatgggtgagggcaagaaaaatgggaaggtgaaaggaaaggactgaaaggaatgtttaccaagggctcatcaggtaccaggctctgtgactaatgtctcacacatgttaatttactcttccactgtcattttctgatgcagtaagagtcagccttacactgcagaagaggaaagaggctgagggaggtcaaatgagtggcccagggtcatccagccacttcatagcagagctagtgtgtttcactgtggtttgtgcagacagaaaagtgagacatggaaggaaggcaaaacatttttgctgtgggtgatgtttatgaaagtgacctgtatgaggcagaataatggcctcttaaaaatgtccacatccgggccaggcgcggtggctcacgcctgtaatcccagcactttgggaggctgagaagggcagatcacgaggtcaccagttcgagatcagcctgaccaacatggtgaaaccccgtttctactaaaatgcaaaaactagctgggcgtggtgtcgggtgcctgtaatgccagctacttgggaggctgaggcaggagaatcattgaacctgcgaggctgagattgtagcgagccaagattgtgccactgcactccagctggggcaacatgagtgaaactctgtctcaaaaaaaaaaaaaatccacatcctaactgttggaacacatgcctttacttttcttggcaaaaacactgttcaaaggtgatgaagttgagtatcttgagatggaaaccttattctggcttatctgtgtggctcccagtgtcatcataagggtcctcttagtgaaagagaaaggcaggagggtcagggtgagaatgatgcagcctgagagactccactggccattgcttgctgtgaacatgtgtgataagacaaaattacaacgaatttagtaatagatgtaattggcttttatttgtgatttatgatttgaggcagctctccctctacagatgcctcagcatcccaagtagctgggactatattgctggatctggccagcagcctgcaatgcaacagggctctttctttgttcccaggcagatcggcaggttgagaaataaaagacacaaacaagatagtgaaagctgggtccaggggggtcaccgccttctgatcctgcgatgctgccaatgcactggatataccagcatttattattaagtttagtgagagtgttggtaggttagtgagggatttagggtcatttatatgctctctataagggtcacattccattcccagagctatggacatctgcttttctgggataggaatcttggttatgtgaaacctccctgactgcatgtccgttcataggctctctgcagggggaagcacatcacgtgctgttggctcattctggcagtccaaccttgcatttgtcttttcacaatcctgcatgcaattttgtgtttacaataatcaggtgcatttcatcttttattccatagcaatagtttcagggggtctccctacatctcccccttttctctgatttcaatgaaccatagcaatcatagcttggcactgatcacgattggattgaagaatattttttccaattttacacatgaacagtaaaccaatagcacaaattatacacagaacaaaattaatgatagtggatcctcccaaagattttacctattgaatggggttgagattagataacccctcagagatactgtctaaaacttcagcactgggtaaagcagttaagtgtgcttgagaggcttcaaaaatctgttctttcagcttgcttatgtctaaacttaatttatattcacttccttgtaaatgggattttactgattcccaattgtgaaaagactcattatattggaacagagttatacaaaaatcagaagtattccaatcacgttgcatttgtaatctatgttctaaactcataattctgtctcccatccatataacagaagcacatcccatgctgtaggcacattctggcagcccaacctggcattgtctttacacaatcctgcatgcaattttgtgtttacaataatcaggagcatttcatcttttattccatagtgatagtttcagggggtctccctacaggactacaggtgcacgccaccatgcccggctaatttttgtatttttagtagagacagggtttcactatattgaccaggctggtctcgaactcctgaccttgtgatctgcctgccttggcctcccaaagtgctgggattacagatgtaagccactgcgcccagcccataaatcaaacatttctttgagtttttgtaattccagcccaagagaaaccatttgatatttgaagaatggctgcacacaaacatttgcacacaaataaaaacatctgtagattgcaccacacgagggagaataccagtatgactatcaggaggaaaatatcaagagtttgaaatatgcaccttaggcaagatgcaaaccaactacaataggatagatcaaagaagaagccagaagagtctagtcattttaaccaggcagcacatttattgatttttacaactgagtctctataacaccggatgtatttatctatgtgcaacaagaagggccagaaactgcacaggctcccaaatgttcagctggtagagagcaattctattatctagcattgcatgtctatgttaaattaaaacagggagtgagaatagggaagtatagaagtggaagcctaaaaaaaactccatatatttgaggaaaaagttgtgttacagatgcagctaacgtcagcctttgggtggattaaaggatctcttggtatgtaaaaatgtgtgggccaggtgcggtggctcaggcctgtaatcccagtactttgagaggctgaggcgtacggatcacctgaggtcgggagtttgagaccagcctgaccaacatgaagacaccctgtctctactgaaaatacaaaattagctgggcgtgttggtgcatgcctgtaatcccagtactcgggaggctgaagcaggagaatcacttgaacacaggaggcggaggttgcggtgagccaagattgtgccattgcactccagcatgggcaacaagagcgaaactccatcttataaaaaaaaaaaaaagtgtggttgacatgatatatctgacactgttaacttactctcagaggctacttcttgtgaaatcctaagtacagcattattctgggaagcaaaggagacaagcattagcaaggacaaattcagagaggtaagagtctcatcatgagtgataatcttgttctgacatcttgagaaaagctgtccgcagtataaagtcatcaacttgttgtcatggtttgcagtttgagtgtctctaagttatggtgttgaacatttcgtgagctcttagtggcccacacctcagacatgagggttttcccatgaagtttacattgaattgtccacctccaacttatatggcttcaggaacagagccgctcttgttcttaatgatttcattggagaaaattgaattggaagaactaaaagaattcagggtccagtccagtctaccagtggattataaatactcagagataatgaacagtggttcaatctggtaacaggtgtactacagtttttcttttcaacatagtttttctgtctataggagtctctatttttaccaaagataattccagtaggatgaatttgtttgcaaaataggttgagtctcaccgaacttgcccagattttttagctaagtgcggaaagagtagcaatggacaatagaggctctttttaaacttctctttgctagaagtttttaataagaatctcagattaaacttccaaaaacctcttgaaactaggaagccaaaccaaggcccacttcagactttgcctgcattccctatgggtttattctatatatattctcaaatataacatcgcagtcaaagccttggtaatataaccaatgttttcaaatgtgtcctgttataaagagagcagatccttactgaacttgtgcagataactttattaccataaacatatgaatactcatgaatagtttcccaattctggggcactcagatagagagcaaaagcaaatgtttcaatttttgtttacaaaagtatactttaccaattgctcaagaaaaaaagttcataaatctggagaataaaacattcaaagaatcagcacattttcaaatagaaaattatgaaaacattatgcttttgattatttagtccaataacatggagtttttttcttctttgtctagaatttcatgaaggtatcagcctgttcattaaaattttgaaagttcttagtccagtggtatgatcttgaagttatcaggaacttgtattcaagagtccttgtcagagtcttttccataaatctccttgaagaaaaagcaattttggactgtaggtgattgtaagtagtttgaggaagaatcaaagcaactgtctgggaaagacaaagatttaaactgactatggttaaaaatctaatgagaatttattatggtaaagacacagctcacatagaaatccagttacttctgtggcatatgacactatggtaacatatttgatttccagaaatttcatataatttttagaatactcatttaaaaaaatttttttttttgaaatggagtctcactctgtcacccaggctggagtgcagtgatgcgatctcagttcactgcaagctctgcctcccgggttcatgccattctcctgcctcagcctcctgagtaactgggactacaggtgcctgccaccacgcccggcaaattttgtttttgcatttttagtagagacggggtttcaccgtgttagccaggatggtctcgatctcctgacatcgtgatgtgcccacctcggcctcccaaactgctgggattgcaggcgtgagccatcgcgcccagcgtagaatactcatattattaacattcccataaatattatttagagaaggtttagcctcacttatcctttatttgaaaatgttttctacacaatttaatatatcaaataaggtggcttttccattcagcttctgtttctcaagaggattactgagttcttggtgtagcccattcataaatagggccaaaaatgtatagtcttatgtatgttgaaaaaggtccttaggtaattccagtacttctagctgaaaatcattcatttagttttaagttctacctattacaacaagagttctccatccttgttacatgttagtagtgtcagggaagacttaaaaattaccaatgccttggtccctctccagacctttaaactggaactaatgggtggggcttgagcatccacttttaaaaatgctttccagtgattccaatgtgtagctctatttcccatcagatttctctgatttcttgtggcattcaattttttctattttggtatcatgattattttcaggtctcatttcctgtcttaggctttatgtctcctggggtagggaccttgccttcttcatttctgtatgttttttgaacacatgaactggtcatcaggaaaagatctcaaccacacataggttgtgttctgagtctcaggttcacatgttaatcctaaagtctccgttctccatgaggtcagatgttgcctgtgatgaagggtgtcgttaagtctgcagtgcagatggtggaggggatttcactctgtttttagacatagcattggaactaagaattttatgtctatatgggtgaaggggcagggatgtgtaggaagacagttctaattaggatgaaggaattatactaggaagtagaggtaaaggaagtgagaaggcttactaaatagaagaaatgtgaacttatcaaataggctagagtagacccctgcagattcttgattaagtgaattaactagattttagaaaggtaatgaggcagtcatatgcaaggaaggtttcaaagtctggccacaagaagtcaagcaatactttgagaagtggttgagctttatgggagtgtagagaattacactattgagagatgttaaaaataatgaagagggtttcaccatgtgaaattgtgtttctcatttgaatctgagaaacaaatgagcagaggctggagataattatgtctaaaagacagtggggtacagggagcataaaggccagggagaaagggaactgcaggaattagttctgagaagcaggagtttagtggaggaaggaggagatgcagtcccagatacaagcaaataagtcttttccctctcccaagcatggcagtcagccctgcaggaaccaggataagagaaaaggccatcatacctgccagtcttcctgaaatacagaaatgacttcacggctgctatattggattaaggagaggaagacgtcctattcctgaaggagctgtcatggaaagaaaagtaaagaaggaatgaaggtgatgttattttacatgggggagcctcaggaagaggcatgtagcatgaggtactctataattgtttcttcaagtactacattattcctcttgggaaattgatgggagatgattatattcttgcagttttttttttccctctcaccatgtttctaggatggtgatcagtcctctgtcaaatctctactgcactcagatattttggaaggctttcagacataagaaaggctgattgctattttctatgtcattagaacttaccaccttttcaccttttcatggttgcatctttttctcagtctctctgttgtggcagccatgaatgagactctgtcaggtctccatggcagggagctgattgacagaaggcccacgtccgtgcatttcacattcatcacctcctttgcacagaaagcttctttcccacaggctcccaggaagggcgtgaaagcaagcctagttctctgaggctctctttaactctaaagggtgactggttggaggactccccctcagccttgcaaaaactcttagaactgcattggtacctaaaacttctttctctttctttttcacaggaatcagctctgcatagtggtctgtgggttctcccatactgccttcatgtctgccccacattccctcacaggtgtcctccctgataaattatcttgtatgtctaatcccatcttgggtgcatctcagttggtaaaaactaacatatcaggcttgattctttgcacttagctttttttccttctctcccacaagtagtcagtaaccatgtcctagtgttttatgtgttacctctttttccatatatatggaaaaaggtaggtactgttgaggggcatttcctatgtgccaggccctgtgctaaatactttacctgtatctcatttaatccacacaataaccctgtcaggtagaaattatttccactttgctgatgaaaagacagaagcttatcatggtgtaaaaactttcctggtgtcatatggctagtgacaggtggatctgaaatttgattctaggactatttgacctcaaggctaatgatgatggtagtaatatagcagctgacattggctcctctgtgtggcatcttgtttcattgattgcattaaacatttaaaagaatggtatgaagaaagcactctcattgcaattttcaggtgaggaatcagaggttcagagaagttgagtcttgtgcaagaaatttataactgtaaactcttacattaaaaaagaagaaagatctcaggtcaacaacctactttaatacttcaggatatgaaagaagaacaaactaaacccaagcacagtgaatgagggaaataataaggattagagtggacataaataaaatggagaatggaaaaagaatagaggaaattaatgaaaccaaaagttgattcttcaaaataaaatcaacaaaattgacaaccattaactagattgactaagaaaaaaagagaaaagtttaaaattactcaaatcagaaatgaaaatggactctgagcatggtgggtcatgttttaatcctagcactttgggaggtcacagcagaaggatttcttgagaccaggtgtttggaccagcatgggtaacctggggagatgctgtctctacaaaaatataaaaaaccaattaactgggcatgttgacatgaacctgtagtcatagcatcttgggaggctgaagaaggagaattgcttgagcccaggaggttaaggctgcagtgagccataatcacaccactgtattccatcctggactggtctacatagtgagagcccgtccctctcttcaaaaaaaaaaaaaaagaaaaagaaagaaagaaaaatgaagcgattactaccaattctaataaaataatgattatgaaagtactataaataattttatgcaaataaattggataacctagatgaaatagacaaactcctagaaacacacaaaaatatgaatagaactataatcagtaataagattgaatcaataaaagcatttgatgaaattcaatattttttcataatgaaaacatcctaagaatagaaggaaaccacctcaacataaaggcaatatgtgaaaaacccaatgctagcatcatactcaacggagaaagactgaaagctttccctgtatgagcaggaacaagacaaggatgcctgcttttgacacttttattcaacatagtattgaaaggtctagtcagaaaaattaggcaagaattgaaaaaaagacattcaaattggaaggaaggagtaaaattctttctgtttacagataacttgaacttatatgtagaaaatcctaaaggtggaacaaaccaattaaaattaataaattcagtaatgttgcacaatacaaaatcaacattcaaacatcagttgtatttcaatacactaaacatgaacaatctgaagggaaattaagaaaaataatttcaatttatattaacatcaaaaagaataaaatatttaggaataagtttaaccaaagaggtgaaataattatacctgaaatctacaaaatattgctgaaagaaatgaaagaagacatcaataaattgaaagacattttgtgttcatgaattggaagactcaatattgttaggaggacagtgctgcccaaagtgagctgcagattcaataaaattcctgtcagaatctcagtgacatttttgcagaaaaagacaaatctgtcctaaaatttatattgcatctcatgactctaaatagacacatagctttgaagaggaagaatgaagctggaggactcacacttcctgatttcagcatttactacaaagccctagtaatcaatacagtgtggtactggcataaaggaggacatagaaattaatgaaatatcatagcccagaaagaaatgcttgcatatatggccaaatgattttcatggagtgttccaagatcattcaatggggaacggacagtgttctcaccaaatgatattgggaaagctggatatccaagggcaagagagtggaacctttacctaacaccatgcataaaaattaacccacaatagatcaaagatctaaatgtaagagtaaaaactacagaactcttagaagaaaagcttcatgatactggatttcacaatgatttcttggttgtaacaacaaaagcataggcaacaaataaaatggattaattggacttcacaaaaatcaaaaccttttatatatcaaagaacattatcaagaaagtaaaaaggcaacctatgaaatgataaaaatatttgcaaattatatgtgtgataagaaattaatttccagaatacatgaaaagctacaagtcaacaacagcaaacatccaaaaacccaattaaaaaatgaacaaaggattaaaatggagttttctccaaggaagatatacaaatatccaataagcccatgcaaagttcctcagcatcacgaatacttagagatatgcaaatcaaaaccacaatgttacaccacctcacacactttaggatggctttgataaacaacaaaaatgacagcaacacaaaacaacaggtgttttcaagtagatggaaaaattggagctctagtgcattgctgatgggaatgggaaatgttatagccactgtaaaaagtggtgtggctgtttctcaaaaaattaaacaataacttaccatttgatccagcaattccacttctggacaaactccccatagaaatgaaaaaaaattgaacaaatatttgtacactgatgttcagagaagcattactcacactagcgaaaaaatggaaacaactgaaaagtccattgaaagataagtgggtaggcaaatgaggtgtatctacaattaaaatgttattcaaccttaacaaggaataaaattccaatacatcgtgcaaaatggatgaaccttaaagatattatgctaactgaaataaaccagacacaaaaggataattatcatataattccatttataaaagatagttagaatagccagttacatagagacagaatgtagaatggtgtgtgctaagggttatggggagaaggagtgagttactgtttattgggtacagaggtttaatatggtaagaggaaaaagttctggaaatggatagtgtgatggttacacaacactaaattgcacacatagaaatagttaatggtaagtcttatattagatatatataaagtgtctggtagtcttaccctctctataattacacactttttggcactgcccctttcctgccatgcagagccccaggggtgaatctctctatttctccagctctgcatcagtcactatcctccgtgctgtgtcccacatgctgtgcccacaacctcatacaaccggtgacttcagagccaggacgcaacgcaggagtcttccctgaggctccctctcttcttatttccctgcagcctggcccgggggaggcttggcttcaactggcagctcgatttagccaaattcaggacaggccaccaggactctttctccacacatgctggtcccaccccaggttgagtgaggcaggcccagtcaccagagaagcatggagcagagcaggaagcagagtctgagctgctcctccctcacccaaggggcttcctcgtctcatttgggggaaaagtgtgagcttgtttcagagcctcagatgttccttgtagctcatggaataggtacaaggaaacaaagacatggcagaaggggatgtgttggtgacatcgagaagcaacttgatcttgaggactctccttctcatccctctgtgaagcctcctctaccacatagggctcagggctgataaagccccctccctaactttcttaggccagacacaaggtcagccatgagaaaacagaaaaacaaggagaagagagtttgtagagacaaattggaagggttcaggaggagaatttgggatttgcttgtgcccatgggacacaggctgggaataaaaatgttttcctaactcttctctgaaagccaggtagactccacctaaaaccctattgccaaggatgctgggatccacttaccagagacttcgactgtcatggatttggagctttccttgccagtagctgagttacgaacagagcaagtatagagccctctatgctttgtagtaatttgggggatagagagcttttgtcctgattgctgaaacttcccattaattgtccaaaaatactctgccggtgggttagattccgcgaagcaggacaagtagaggttttctcctgaacggtaataggtgaatgaagggtaaatgctggggaggtctggaccatctggagcaaagagaatgaagccacaggtgatgtcatccaagggaaggggatgctcctggtctcttaaagggacacagtgaccctctgagccaagacacaccctcaagtcccagccgaacccccactatattcactgagccaaagcctgaggtattcacctgtttctcccatcacaagctattgacacaaagtctcccatgacaagagcgccccctccccttatattcctggttaaggctgtgcctacctaggttttccaagggcagggagtcatggccagctcagatgtccagaaataaaggtgtctatacttggaccggagaaagactgagaggactggcttgtggtcatttagatttaagctggtgtcctggcccacagaggaacaaaagatactcacagaggacattcagggtgactgggtcactgcgcatgccaccatctcggtcccgtatttcacattcatagggtcctgtttcatttctcgtgacactgggtagaatgaggatcctgttttcaatgggtcgctttaccctgggactgaccgggaggctctgaccatttagccaccaaatgtaggtgtagttctcactcttaggttcacaggtgaaggctaagacatccttattctccctgggttttgagttgttgatggtgatgtagggcttgggcagcttcactgtgtggataacagagagaagattgtcctgtgtggcacctttgattcctccacaggcatccttcaatcagagttggcatctcccacctgtcaacccaccagagtccttgaaagccagtagctgatgcatgtgtcacaagatagatgcatgatgatctaagggctcaaagactgtgaggccacctgctctgttttagggaagcacagactttctcaagtgtcaattgagcagcagtgttgggtcatgaacagacacatcagtgggagtcacagcccctggtacccctcccagtccctccataatcagttgactggctggctcaccctgggttccttacctggaatgtgcaactgctgggccccttccaaattccatcctactttgtccccctatatgtgatttctctgcagctcccatttccaaggacattctagagatgagtaataatgggacttcccattgtcctgaaaccctgaagatactgagcagtctggcctgggactggatgtttcagcagaaataacacaggagagaccagagtcaagcctggaggtcagttcagtcatcagccagtggaggcagaaagtggggcagtgttttgcaggtgtttcatgatgacttacttgaaccagtgacctctaaagatagagcagagtgcaaggaatgatctagaaggagtcaaggggacaggcaagagctggtggctttggagcagaaccatgttccctgtcctgggttctttaagtttcctctccttctgcagagggcaggtgaggaccatgtggatctttccagaaatacatgtggatgtttgcaaatgcagaactgattggtagaaagggtgggaatgaactgctggaaatctggtcctcatggaccatgtgtgtttgatggatatgagacaaatttgaagagaagttttgggaatattttctttcactggacattctactctctgattccatggattcgactactctagggacctcatgtaagtggattccagagtgaatatgagaagagactgctgtttgccaggagctgggagtggggagaatcagaagttgttcatgggtgtgcagtttcagttatgcaaggtggggaggttatagagattggctgtcgagcttgatacctatagttcacacagattgagtatttcttatgcataagacttaggacaaaaagtgttttggatttctgacattttttgattctgaaatatttgtcatatacttactggtttagcatcccaaatctgaaagattcaaaatctaaaatgctccagtgagcatttcttttcagcatcagattagtgggcaaaagtgggaggtgataagccaaatatattcctgcccttttttttttttatctcaccacgtttctaccatggtgattagtttttggtcaattccacactggccattctgcactcatatatttttgaaggcttttggatgtgagaaaggctgattgctgtcttctatgtcatgagaactttaaacattttcatggttgcatctttttctcagtgtttgtgttgtggcagtcattaataagagcctgtcaggtcagatttaagacagagttttctaattctgcaaaaaatgttactgggattctggtaggagttgcactgtatctgcaacttgctttgggtagtattgtctttctaacagtattgattcttccaatccttgaaaatgaaatgtctttccatatattgatatcatctttaatttctttcagcaatgttttgtagttttcagggtataatcatttgacctttttggttaaacttattccaaaatattttattccttctgatgttaacgtgaattgaaattcttttctcaatttcctttcagattgttcattgttagtgtatagcctaaagaatgatctagaaagagtgaaggggaaaggcaaaagctggtggttttggagcagaaacatactccctgtgctgggtttttgattttccctctccctttgcagagggcaggtggctcttccctgatagctagatagacttcactggaaaacatattgccaatgctccagggatccacttaccagggactatgatcctcttgattatgagatttgttccatcagtggctgagttatggatgaaacagacatagatccctctatgttttggtgatttggggaataaagcacacttgtgctgattgctggaacttcccatcaatcagccaagaatgctctgccagtgggtgagagtctgtgaggcaggagagattggggacttcccctgtatggtaataggtgtatgaggaagaaatggtgggggcatccaggccatctggagcaaagagaataaagtcacaggtgacattgtcagagggaagggaaaatcctggtctgtggaagggccacagtgaccctgtgagccaagtcgcaacactgaagtcccagccaaatccccgctgtgttcactgatctggagcctgagacattcacctgtttctcccatcacaagctgtggaacctgagtctcccatgacaggagcagcctcttttctcctattgtggatcaagcctaggcctactctgttttgcctggggcagaaagtcatggccagctttgatgtccaggggtaaaggtctctgtacttggacctgagagggactgagaggcctggcctctggccatgtgtatttgggatggcagcctggctcacagaggaacagaggatactcacggaggagattcagggtgactgggtcactgtggctggcactcactgggttccgtatttcacattcatagggtcctgcaatatactttgtgacaccaaatataaagagggtcctgttggttttggacagctgcaacctgtgagtcatagggaggctctgaccattcatccaccacaggtagcttgtgtctgaagccgcaggatcacaggttaagatcacagcctccatggcctccctggggtttaagttgctactggagatggagggcttgggagtttccactttgcagaaaacagagagaagattgccctgtgtggcacctttgattcctccaaaggcacttttcaatcagagttggcatttcccacctgtcagcccacccaagtccttaaaagcccatggcaggtgtgtgtgttacaagacagatgcatggcaatctgagagctcagagattgtgaggctgcctgctttatgtgggagaagtacaggctttctcaagtgtgaattgagcagcagcattgggtcatggaaagacacaggaccagcagtcacagacccgatgcctctctgagttcctccgactaaaactgcctgcctgacccaccttgtggtcctcacttggagtatgcagtgctggaatcttcttagtttcagtcttactttgtcccccgaggtatgttttctctgcagcttcccttgccaaggacatcctagagatggatgatggaacttcccattgtccttaaaccctttgggtactggaaagcctggcctgggactgggtacttcagcataaataacacaggggagaccagagtcaagcctggaggtcagttcagtcatcaggcagtggagccacaaggtggcgcagttttcccaggtgtctcatagtgactgacttgagccagtgacttctaaagatagagcagagtccaaggaatgacctacaaagagtgaaggggacaggcaagagctgatagctttggaccaagaccattgttccctgttctgggtccatgatgcttccttccccttgtagagggcaggtgaggaccatgtggatcttctagaaatacatgtggatgtttgcaaatgcagcactgactgttggaaagggtaatcatgaactgatgatggaagtctggccctcatggaccatatgtgtttggtggatattagaccaatatttgggaagaagtcttgcagatactttctctcattagacattctactctctgattctgagtttgactactctatgtacctcatatcagtggattccagagtgaatcagagagtagaatagtagtttgcaggagctgggatcaggggaatagggtgttgttccatgggtgtgcggtttcagttatgcaggatgaggaggttctagagatctcctgtgcagcctcgtgcctatacttcatgcagatacagtgctccttatgcagaaagcttaaaacaaagtgttttggatttctaatttttttaattttggaatatttgcagtacatgtactggtttagcatcccaaatctgaaaaatttaaaatccacaatgcgccagtgagcacttctttttaacatcacatcagtggtcagaagggttgagttttggagcatttcagattgtggatttctggatttccgatgctcaattcgtaatactgtaattttcccataaaaagttgtcaggagtttagacctcatgttatgttctgactctagtaacaaaaaaaatttggaggaaacattaaaatgttttcataagtggaaatttttactgatgatccaaacatctaagatcaattgctggtagtagtatttctcttgagaccaaaataaggtttaggtgtgccgtgaattccagcaggatcacattatgctcaaagaaagacgccaaaggtgatttgaaattagcagctccttaagtagagagtcccgttaaaaggacagaactggtcagtgcgtcaattacataaagggaggaaggatgccaaattaaaagaagtgatgtgtgttatgttagtaaatatagaaagaactccctgcttctaatttctgtgcagagttaggaaaaatggggaggaccccaaaacaggtatgtgaaatgctttcttcattttctcttaagctcacgaaacaccactaaagtttaagtttgtgtgaattaggaagaatctaagtgagatgccaatggctcgtgtgtctccccacacgtagaactccaacttatgaaaatggcatcatcatgaggaaacagttttatgtggcacaggcagtaaaaccattagatagcacacacctggccacctccaactggtccccaaaaccaccaatattcacattacgtgtatctgacagcctttgcagttgtccacaactacaaaatttaaaaattgctattgccaaaacaaaatattaaatgtgaagttgaatgtgttgttccactttttttcccccactcttattgaactttcctttttcagttttggaagtttctattgacacatcctcaagccagagattctttccccagctgtgtgcagtctaccagtaagcatcaaaagcattcttcatttctctaacagcatttttttttctgagacagagtctctctctttcacccaggctggagtgcagtggcatgatctcagctcactgcaagctccacctcctgggctcacggcattctcctggctcagcctaccaagtagctgggactacaggcatccgccaccacgcccagctaattttttgtatttttagtagagacggagtttcaacatgttagccaggatggtctccatcttctgaccttgtgcccgcctcggcctcccaaagtcctgggattataggcatgagccactgtgcccagccatctctgagggattttaatgagttgttgacttttgagtttgttcaactttttacttactgttagaaccgagtgacaaatttcaagcttgttatatgcctgacaggaagccagaagtctctaagaagtgacaggagaatgtgagctccatagtagtttgaggatggagtcacgagtgaaacagttgaaatgagtccatgggcattggggactgcaggcctgtccagcctctgacaccctggtgagtcagtccatacattacaacagtgacagcaaagtagcatgtctgactccatctggcatctagtctctggctggctatcctcactcattcctgggcataggccaggctaaccttgggaggaatttaatttatggtttgactttgaagcaagaatcacaaaacttcctccatgaaactaacaaccttactttgcccagggatggcctttgtcaaactagtgaaagaccatgagattaagattataggagggaactgaattctgctaaaatgttggcacagtttctataattcctgactgctgcaatgttgtttggccagagtttacaaaatttgtaactaattgctcctatagataacatcactattgtagaacatgagattggtcttttgagatgtttctcattcttttgcattctggcaaccggctgacctcattcatacctatgactaatggctcagccagtcatgtggtccctacctggaggcagattcgagcacaaacagatcatttccctctgcccacatgattccatcaccaaataatcagcagtactcattttttagtcctgtgcccctgaaactatccttgaaaatctctaacccctgatccactggggaggctgatttgagtaataataaacctctgtcctcctgtttggcagacttggagtcgttaaaatctttcttgactagaaaccaacatttcaataattttttttttttttttttgtgcaggaggccagaagatcttgcctggcaattatgaatggatggaggaactgcctatccctgtcccattgtcttgtccacaggtcagcctcacaaagggaaagagccctggatgggaatacagtggaagctcattctcttagtgacctgggaacattggctcgagatgaagcctggcaggagtggcaactccaggtgatttctgcacctttcctatttcctgggaggtgggccaggccacagtgttagcgggaagggaacagaacagccagcctagttagagggagtgtctggggaaggcctaggggtgggggaagaagctgtgcaggacagggcttgccagtcagaatgaagtgggaggaagatgagggacacagagaagcagaggcagagacaccatggcagtgagcagtgagggagacactgacttcagagaccccagggaccagctgcccccagttccacagtccaggacaaaggagccctgagaatcctctggtggccaaagagcttcagagttgcatgaggtggggtggctttaggggcaagaggtagtggggggatgaaacatggatgtcagcctctgaaggacaagggacaggtgtggctagaacctcctaggattctgcatccaacatccagtctctaaagaggttttggatcattcatttcttcattccattccttcatttgttatgtgagagctcctgagtgtgtgtctctcgctgggcctgtgctggagcagggtctgagtggggaaagaaaacaaagtcctctccttgatcctttcatgacagtgacatgggcactttgggaaacacaggatttcaggttcagtgatgggggttaagatctgagggggaggcctggacatattttttgcactgactctgacggttgaggcagttgatttagttctggagtgcagactaatcagctgaccatttgctctcactcctctgaggtttagaagcctaagaagagaggatttgagccaataaatgactatggggtccttggaacccagtaagccctcacttctggtggagaagatgggcctgtggctgcagacagacctcatgtgaccctgatctccccctttgggtttgtgtgactctggttcagtgactgtgccttcctgtgcctcagttttctctcaatcaaataagctaagtggcaaatggactgtggattttcatgctactgtgaataaatgttaaatgattcagtcacctgacctaatgcttggcacagtggaggtttcacacaaacagcatttattattaatttgcttccatgagaaagcacctttacgtcagatccctgtggacaagctgctaccaggtacatcttctcccttctgtttatgcttctggggacattagactttctatggactgtcctaagcctcctaaagcagttggctgatgtcctacaaagcttgtctttctgtcctctccactctgagtgtcaggtgaagaaagctctgtctttgcccagatgaggctctgagggctgagccctggctggtgagcagctccaggagacacagtcctcagacagctggtaaattcttggtcccagtaaggcctgcccaataagccacaacccagcactggcacaggctcctcagcttaactggagcaaggatttagggacagaggtctggggttgaggcttctagggctgagcttctctgagggtctcagggggcccctcaggccaaagccctactcagttctccagggtctttctcagggtcaaatttatgaagagggcatgaggtgcttggctgagactgatctcctcctgctgagtccccccatcagactgtccttcctctgcagcgagtgtctgcagggtctggatgcgggaaaggaattctgatctgttgaaatttgtctcctctgtgtgtgtcctgcactaaatgcccaaaccgcagcatgggacataatgcagagagggacacaggcacagtgcaggcctgacaatcctgtgtgtgtgaagtagaaatgacccctgtcccccaacacccagggatcatgtggaatcactcacggtataagttgaaggtgaaatatccagttactcctctagtcctatcacctcgctttatgatgtgtaaggtgtaggatcctgcgtcttcccgggtgacattctggatcagcagggatgcattggaatatactgtttctcgtccagtgtatgcaggcccatatatatttatttgaccgtctactacatatgatgtaatgtaatggtagaggtccatcagttgtcctttgtaccagatgtagccagcaagattctgaggcaaattgtggacaagtagaagaacatccttcccctcggaaactttgggtggcagggcttcaatcgtgacttgagcagtgataggcaggttccagaagtttaaaagtgatgctaggaggtggagaaagcaccagtcaatattgagacctgtgtattggggtgaaaagatggagccctgggtcctgagaaggtctcttcaatcctcagccttgaagacacacacacacacaaacacacacacacacaaaaggtgcatgttagtttgtgtgtgtgtatgtgtgtgtgtcctactgtcctactaggtcaaggtcagcagcgtgacccctattccttcaacacttctgaccttggcatttttgtatggaatcctcttccccaggggtccacacggcacccccccccccccacactgccctcaggtcctgctcacatcagggcatccttagacttctttcctgacacgtccttcagagaccctgggtcttccctttctgacctttccctgctctgctccctccagggttcttgtcaacacctgacctcacattctagatctctttgcatgtctgtcttcctccccatgacagcgtgagctctgtgaggacagggacttttgtgatcttggttgcaccccagtgcctggaacaggctgcagactcctgcagatgtgagagttctcagggccctccacacccttggtgttttattttcccccaattgttgaggattttgctgaggacagtgtttcatgtcctgcttatacttttattagaagtgtcatctgatatagttattattatcatttttcaaaatgtcgtggccctcttaccaattccggttcaatatgactttccagttttgacctctgtccctctctggtgtattttaccctatccaggctccaacagagacttctttccttttttttcttttttcttttttttctttttatttttttgagacagagtctcgtactgtcacccaggctggcgtgcagtggtgctatctcggctcgctgcaacttctgcctcccgggttcatgtgattttcctgcctcagcctccagagtagctaggattccaagagcacaccaccatacctggttaattttttgtatttttagtagagacagggcttcactgtgttggcaggactgaccttgaactcctgatctcataatccacccacctcatcctcccaaagtgctggcttcttttattttttagaaccccatcctctccaggagacccaatccagtcactcttcttcctcctcctgtcctctcccaggaagttctctcctcacctgtgagcaggagccccttccaggtgatgtgctgtgtgcagggaggggctgagaggggccccatggtctctgcgcctgcgtgttctcctctgtggagctgagcctaggatccagaaacttcctgagcacggctgtaggctgtgctgtccttcctccttctgtgctgagcctctctccagggcaggagcacttctcaggctcatgggtggggtcaggcccaggacacctctctgtcccctcctctctcagtcctgcctccttgtccctccttctgtttttccttttgtctgtgtttcaggtccctgggaattgtggaggcctctgcatttttcagcagtgattctttcaccaaacctcaaccacactttgtgcagacacacacacacagaagagacacacacagacccacacagtcacacacataccccgcaggttgggcaagcagagtcctgggcctcagcctcctgctgtccccatggctctgggtcgggatgcacattcacgccctttgccctctttcatccccatctggctctccccttcagtgcaggaggctgaagctgcaacgggtccctgtcacagtgacaccccattgtgctgtgggtgagctgtgtgttgcctggtgagagggacccttcctttctctaatcgtgtctagcttggctgcagcttccaaggatggaccttcaggacctgggtgtcccagaggaaactgtccttcctggaggtgtgcagggtgaatctctcatgcctcttgggaggagaggcctgtgctggttgctcagtgggggctgtgagtcccagagtcaagaggacagttcttcatcactctatggctccctggggtctggcagctgagctggagctcagggtttctcatgttctccctgaccatctttgatgtcctctcttctctgcccagctgactgtcctggggtcaccacaccttccccgttgtggtgcaggaggaagtggggagttacccaggaaccccgcgggacatggctcgttgagacgcaggagggggagcctgggacagagcaggggttcagagctggagagattcatcccgacttactccgtggccatgatgggctcagccctccatgtgctgacatacccaggggtctgtcctgagggttttgacctggccaagctgctctctgtagaggaggaacaggcattggccagagatcctgtctggagggacgttgctcacacctgagagggcgggtgggggtgagttgtgttctgagagcaaagagcaataacacccctcatctccccgcaagcacacaagagaggtctgtcttcccaagggacagctggtggcaggtggccacatcccggatggtgcctgtgtgtgaccatcacacgctctctgcgccccctgggctgcagcaggcaggcaggacacagggtgcctggcttattcccggggaggctgtgggccctcaggcagccactgttctgtgtcaacactaggcttggcctgggatgccccagagaacaggacagatggagcaggggcgggcatttagggagcagtgacagaaagagttgatgaggatggagggaggtcacgaggggaaagagctcagcgtggcgtcgcgtgcaccagcgctgccctgggagatgcctttagctgggcccagggaaggagcaggtgtgtggggctggagctacctacagagggagtggtgttaggttggcggccgccaggtcagagaggagctgacagagtccatgtggggagcatggagggcgctgaggacttgggccgaattgaccctggtgagggtggacccttctgggctgtgggttctaatgagggacgttggcatcccctgggaaggctccaggctgggagggactctgtcgtcctctggtggacagggagggaagtgtgaacggcagcaatcccaggccaggctgcatgttttattccacatggatctgcacacttcacacgaggtcacacttacgttatgttacagctccttcaccttccagccccgtgagtcccagtctgtgtggctctacgttcactgttctccctctttcacaatcagatgtcccaaatgcagatttttgtcaccttctgtgagtttgtgtttgtgtgcagtaggcagcactgtgtataccctgggggcagtgatgtctggggctgagcactgcagttgggcttgggagcagaagagggagcagcaggatgggaagaccaatatcaggggggcagggacaagtcattttcattttctcactcccagggaccagaacccaggattctgactccagggcacagtaccacaccctgctggtgtccctggatgtcatgatgctcatagtgtcatgttgccttggcattcatttttataaggtgtaagtttatttgcctcaaatcagaggcagggcttggtcaccatggcagttttcaatactgtatctggttcaggtggctccagttggtgtccagagataaaatcttagaggcatctctgctgcttggtgtgctgggctcccgtctctccagctgctttccttaaactgataattctgacattcgccctcacatttaaagtgaccacctctcagtcacagcgtgagctcctggtcccagtgtttgctgcttgctttgaacacatccattaaagctccctgctggaaacctgtcagataacaccctggacttaataaagccattcgcttacaggtctcttctctcctccctgcctgggctcactgacctctgtgtctgtggtctccaggtgtgccaagtgctccccagtgtctgtaagtagtaaaaatcttacaatttcacattgtggttgtattgctgttgcctcacatgccatccagggcctgacattgaggctgccttatgggacctgtgctggctgagcccctgctggagctcttgttttggggcctctggttctgctggggacaggagcttccagctaacttgattgaaaactgatgcctttcattgaaaacactgggtcagatgatgtattcatgggcttcagctgccataacaaacaccttagcctgggtgaattaaataatagaaatctatttttcacagttctgtgaataatgtgctattttaaccactttaaaataaacaatcaagtgaaattaaccacatacacagtgttaaattaccatcaccagtatttttcctagaaaatttttatcattttaaactgaaactttgtatcttttaaacaataactccctgtatgttccaccctagactttgatcatctctactctgtctctatgaatttgcctattcttaatggttcatataaatggaattatacaatggtgttattttgtttctgacatatttcacttagcataatgtttccaaagtccatgcatgttccagcgggtgtcagagcttcattcctctttatggcagattaacattctgttgtatgtgtcaccatatttatttattcatgtgttgatgaacacttggattgttttcatattttatcttttgtgaataatgctgcaatcaacattcctatgcaagtacctgtttgagtccctggatttaattttttgggtatatacctaggaatggatgttgtttcaaatgagaattctatgattagctttttgaggaacaggaaaactgtttctcctagtggctgtacatttttatattctcaccagcaatatatgaggattcgaaattctacataatgctgctacttgttatttaacattgtaaaagaatggtagccagttttgtaggtgtgattggtgtctcattgtagctttgacgttgtattttcctaatgactaatgatgttgagtatcttttcatgtccttcttgactatttgtatatcttctttgaagaaatgtctatttgagtcttttgcccatttataaattggatggtttgtccttttgttattgagttgtagctagttcttgatattatctggacatgaaaactgcctatatgtggtttgcagatattttctctcattctgtgcctattaattattttcttgataatttcctttgatgtacaaaaggcttacatcttgataaagcccaatttatctttttttcttgtttctcatgcttttgtatcatatctaagaatccactgcacatttgagatcatcaatacttacgtctatgtttattttaagatgtttttatggttataggtcttatatttaactcagtgatcaattttttagagaatggtttgatatcgtgggaggtagaattatctaaattaactgttttgcatgtggttatctagttgtttctgcactatcatttgaaaggagaattgttcctccattaaattgtcttgatacctccttcaaagagtaattgaccataagtgtcagggtttatttctagactctcaattctatcccatttgtctttatgtctatcttttgccagcagcttctgttttaataattgtactactttgtcagttttcaaataagaaagttcaagtcctacaatttatttcggcaagattgttttggctattcagtggtcctttttgaaaggtgggaaggccagtgtttcacaattgggaaagccttttctgtcttcttcagggggaaatttgggagaaccttcaagaaacttattctaagtaggtaaactgtcaccactttatttgctgaagtgctatgttaaagtgtgcattgcctcttgtggaagaattgtgagaccctggaagcacttgcccatgtggtgagagacagtaaattccacgatgaggggggaagggaacattgttttaggacaccgtgttgttggggagttgtatacatctctacttatttatgtctctgtacagtgggtgtagggaccagccccacagggtcggtgggtttttctccacatgtacagagatgagagattgtagaaatgaagacacaagacaaagagataaaagaaaagacaattgggcccagggaaccactaccaccaagacgtggagaacggtagtggccacgaatgccaggctgcgctgatatttattgtatacaagacaaaggggcaggataaggagtgtgagccatctccaatgataggtgagaccacatgggtcacgtgtccactggacagggggcccttctctgtttggcagctgaggcagagagagagaggagaaagagcttacagcattatttctgcttattagagacttttagtactttcactaatttgctactgctaactaaacagcagagccagctgtacaggatggaacatgaaggcagactaggagtgtgaccactgaagcacagcatcacagggagacggttaggcctccggataactgtggttggacctcactaacatcaggccctccacaagagatggagaagtagagtcttctctaaactcccccggggaaagggagactccctttcccggtctgctaagtagtgggtgtttttccttgacactgagggtacctctagtccatggtccacttggcaacaggtgtcttcccagacgctggtattaccactagaccaggagccctctagtggccctgtctgggcataacagaaggctcgcaatcttgtcttctggtcacttctcactatgtctccccagctcctatctatttatgacctggcttttcctaggttataatcatagagcgaggattattataatattggaataaagagtaattgctaccaactaatgattaatgatattcctatataatcatatctaagatctatatctggtataactattctccttttatattttattatactggaaaagctcgtgccctcggtctcttgcctcggcacctgggtggcttgccgcccacaagtgggcatctccgttggacacagtaggttttgaaatccttgtttattctctggggtctgggtcttggcttacctgttagctgcagctgaaagaggtgtctgctaagtcaatgacacctgtggggagaagaaggattcagcagagtgaaagtagctgggactcagagaagccaggaaagtctgactcttagaaactgtgggtcagcagatgggtgtcctcagggataaatgggccatgccggtagccactgcagtgaactggaagaaggtaagggatgctgggtatcccatgttctctctcagctctgcagctgaagatttgggccctgggctagtacagccctgcagcaggggaagggtatacaggaatggctgcatatcaggaccaagtccatgtcatcttcttaggcattgttactgcagatggaggattctgttcagagacctggcctggacacatgggagggcccaccccattcttttaaaattattttaagagaacagtattagcaaatgtggtacatgttttattctgctagaatcagtattactgtcacgttttacactgtatctcttaggaaatggtgagagccatccacacaatgtgcatttaaaggagactctactataatttcagctttcctactctttatagaaaccatcttctctgcaaacacacaggcaatatctctgtgttcatttctattgggagccctgtatgcaagatggagagagccacatttcccctgagatgttacgtaaaagtttgaggttgagatgacatatctgacactctgttgttaccctcagaagctactacatgtgaaattctaatgactgcattatcctgccaagtgaaagaggcaggcatgagcaaggacggttaagaggggtgggagccttatcatgatggggagtcttgttctgacatctttggaaaaactgtccacagtgtgaagtcatcaacttgttatcctggtttacagtttgagtagctgttgttatggtgtcgaacattttggtgagttctgagtggctcacatgtcaggtacaagggttttcccatgaaatttacatcgagttgtccacctccagcttatagggcttctggaacagagtgggtcttgctcttcgtgattccatgggagaaaatggaattggaggaactagtagaattcagggtaatatccagtctacaggtggataataaaaacacagaaacaatgaacagagctgcaatctcataaccggtgtactacagtttttattttccacataatttttctctctatgggcatctctagttttaccaatgataatttcagtagaataagtttgtttgcaaaataggttgagtttcttcaaacgtggtctgattctttacataagtgcagcaagagtagcaatagaccatgtaggcgctcttttagaattttatttgctctaagtttttataaggactctcagattaaacttttacaaaacccttgagaataggaagccaaaccaaggctgacttcagactttgcctgcagttcatattggttcattctatctatattcttgaatataacatcccagtcaaagccttggtaatataaccaatgatttgaaatgtgtcctgttacaaagagagcagattgttactgtacttgtgcaaatatgtgtattaccataaacatatcaatactcatgaatagttgcccaattctggggcagtcaggtagagagcaaaagtaaatgtttcaattacggttcccagaagtatagtttattgaactgctacaagctatagatagattaaaagaaaaaaattccataaatctagaaaacaaaccatttaaagaatcagcaaattttcaaataaaaatcataaaaatattatcctcaatattgtcaattatttcaatgaaatcaatgtttctcctgcttggtctaggctgggaattttaagaagatatcagcctgtttgttaaagttttggaagttcttagacaaattgggagtgttcaggagtagaatttgggatttgcttgtgcccatgggacacaggctgggaataaaaatgttttcctcactcttccctgaatgccagatagactccacctaaatccctattgccaaggatgctgggatccacttaccagagactttgactgtgatggatttggagctttccttgccagtggctgagttacgaacagagcaagcatagagcccactatgctttgtagttatttgggggatagagagcttttgtcctgatagctgaaacttcccattaattgtccaagaatattgtgcccgtgggttagactcggcgaagcaggacaagtagaggttttctcctgaacggtaataggtgaatgaagggtaaatgctggggaggtctggaccatctggcgcaaagagaataaagccataggtgatgtcatccgagggaaggggatgttcctggtctcttaaagggacacagttaccctctaagccaagacacaccttcaagtcccagccaaactccctctatgttcactgagccgaagcctgaggtattcacctgtttctcccatcacaagttttaggccccaagtctcccatgacaagagcgtcccctccccttatattcttggttaaggctgtgcctacctaggttttcccagggcagggagtcatggccacctcggatgtccagaagtaaaggtgtctatacttggactggagagagactgagagacctggcctctggtggtttggatttaagctggtgtcctggcccacagaggaacaaaagatactcacagaggacattcagggtgactgggtcactgcggatgccaccatatcggtcccgtatttcacattgataaggtcctgtttcatttctcgtgacattgggtagaatgaggatcctgttttcaatgggtcgctttaccctgggactgacagggaggctctgaccatttagccaccaaatgtaggtgtagttcttactcttaggttcacaggtgaaggttaagacatccttattctctctggggtttaagttgttgattgtgatgtagggcttggacagctttgctgtgtggataacagagagaagattgtcctgtgtggcacctttgattcctccacaggcatacttcaatcagagttggcatctcccacctctcagcccacccgagtccttgaaagccaatagctggtgcttctgtcacaagatagatgcatgatgatctaagggctcaaagactgtgaggccacctgctctgttttagggaggcacagactttctcaagtgtcaattgagcagcagtgttgggtcatggacagacatatcagtgggagtcacagccccttgtacccctcccagtccctccctaatcagttaacttgctggctcaccttgggttccttacctggaatgtgcaactactgggccccttccaaattccatcctcctttgcccccctagatgagatttctctgcagcttccatttcaaggacattctagagatgagtaataatgggacttcccattgtcctgaaaccctgaagatactgagcagtctggcctgggactggatgtttcagcagaaataacacaggagagaccagagtcaagcctggaggtcagttcagtcatcagccagtggaggcagaaagtggggcagtgttttgcaggtgtttcatgatgacttacttgaaccagtgacctctaaagatagagcagagtgcaaggaatgatctagaaggagtcaaggggacaggcaagagctggtggctttggagcagaaccatgttccctgtcctgggttctttaagtttcctctccttctgcagagggcaggtgaggaccatgtggatctttccagaaatacatatggacatttgcaaaagcagaactgactggtggaaagtgtgggaatgaactgctggaaatctggtcctcatggaccatgtgtgtttgatggatatgagacaaatttggagagaagttttgcaaatattttctttcattggacattctactctctgattccctgggttcgactactctagggacctcatgtaagtggattccagagtgaatatgagaagagactgctgtttgccaggagctgggagtggggagaatcagaagttgttcatgggtgtgcagtttcagttatgcaaggtggggaggttctggagatctgctgtagagcttgatgcctataattcacacagattgagtattatgcataagacttagaacaaaaagtgttttggatttctgacatttttttattctgaaatatttgtcatatgcttactggtttagcatcccaaatctgaaagattcaaaatctaaaatgcttcagtgagcatttcttttcagcatcagattagtaggcaaaagtgggaggtgataagccaaagatattcttgccctttttttttctctcaccacgtttctagcttgatgattagtttttggtcaattccatactggccatgctgcactcatatattttttaaagctttgggatgtgagaaaggctgattgctattttctgtcgtcagaactttccacgttttcatggttgcctctttttctcagtgtttctgttgtggcagtcattaataagagcctgtcaggtcagatttaggacagagttttataattctgcaaaaaaatgttactgggattctggtaggggttgcattgaatctgcaactaactttgggtagtattgtctttctaacaatattgattcttccaatccatgaaaatgaaatgtctttccatatattgatatcgtctttaatttctttcagcaatgttttgtagttttcaggatataatcatttgacctttttgattaaacttactccaaaatattttattccttttgatgttaatgtgaattgaaattatttccttaatttcctttcagattgttcattgttagtgtatagtctaaagaatgacctagaaagagtgaaggggacaggcaaaagctggtggttttggagcagaaacatattccctgtgctgggtttttgattttccctctccctttgcagagggcaggtggcttttccctgatagctagatagacttcactggaaaacatattgccaatgctccagggatccacttaccaggcactatgatcctcttgattatgagatttgttccatcagtggctgagttatggatgaaacagacctaaacccctctatatgttttagtgatttgggggataaagcacacttgtgctgattgctggaacttcccatcaatcagccaagaatgctctgccagtgggtgagagtctgtgaggcaggagagattggggaattcccctgtatggtaataggtgtatgaggaagaaatggtgggggcatccaggccatctggagcaaagagaataaagtcacaggtgacattgtcagagggaagggaaaatcctggtctgtggaagggccacagtgaccctgtgagccaagtcgcaacactgaagtcccagccaaatccccgctgtgttcactgatctggagcctgagaccttcacctgtttctcccatcacaagctgtggaacctgagtctcccatgacaggagcagcctcttttctcctattgtggatcaagcctaggcctactctggtttgcctggggcagaaagtcatggccagctttgatgtctaggggtaaaggtctctgtacttggacctgagagggactgagaggcctggcctctggccatgtgtatttgggatggcagcctggctcacagaggaacagaggatactcacggaggagattcagggtgactgggtcactgcggctggcactcactgggttccgtatttcacattcatagggtcctgcaatatactttgtgacaccaaatataaagagggtcctgttggttttggacagctgcaacctgtgagtcatagggaggctctgaccattcatccaccactggtagcttgcggctggagtcgcaggatcacaggttaagatcacagcctccatggcctccctgggatttaagttgctgctggagatggagggcttgggagtctccactgtgcagaaaacagagagaggtttgccctgtgtggcatctttgattcttccaaaggcatttttcaatcagagttggcatttcccacctctcagcccacccaagtccttaaaagcccatggaagatgtgtgtgttaaagacagatgcatggcaatctgagagctcagagattgtgaggctgcctgctttatgtgggagaagcacagactttcttaggtgtgaattgagcagcagcattgggtcatggaaagacacaggaccagcagtcacagacccgatgcctctctgagttcctccgtctccaactgcctgcctgacccaccttgtggtcctcacttggagcatgcagtgctggaatcttcttagtttcagtcttactttgccccccgaggtatgttttctctgcagcttccctttccaaggacatcctagagatggatgatggaacttcccattgtccttaaaccctttgggtactggaaagcctgacctgggactgggtacttcagcataaataacacaggggagaccagagtcaagcctggaggtcagttcagtcatcaggcagtggagccacaaggtggcgcagttttcccaggtgtctcatggtgactgacttgagccagtgacctctaaagatagagcagagtccaaggaatgacctacaaagagtgaaggggacaggcaagagctgatagctttggaccaagaccatgttccgtgttctgggtccatgatgctcgcttccccctgtagagggcaggtgaggaccatgtggatctttctagaaatacatgtggatgtttgcaaatgcagaactgactggtggaaagggcgaacatgaacagatgatggaagtctggccctcatggaccatatgcgtttggtggatattagaccaatatttgggaagaagtcttgcagatactttctctcattagacattctactctctgattctgagtttgactactctatgtacctcatataagtggattccagagtgaatcagagagtagaatagtagtttgcaggagttgggatcaggggaatagggtgttgttccatggttgtgcattttcagttatgcaggatgaggaggttctagagatctcctgtacagcttcatgcctatagttcatacagataaagtgctccttatgcagaaaggttaaaacaaagtgttttcgatttctaatttttttattttggaatatttgcagtacatgtactggtttagcatcccaaatctgaaaaatttaaaatccacaatgcgccagtgagcacttctttttagcatcacatcagtggtcagaagggttgagttttgagcatttcagattgtggatttctggatttgggatgctcaatttgtaatactgtaattttcccgtaaaaagttgtcaggaatttagacctcatgttgtgttctgactctagtaacaaaaaaaaatttggaggaaacattaaaatgttttcataagtggaaacttttactgatgatccagacatcgaagatcaattgctggtagtagtatttctcttgagaccaaaataaggtttaggtgtgccgtgaattccagcaggatcacattatgctcaaagaaagatgccaaaggtgattggaaattagcagctccttaagtagagagagtcccattaaaaggacagaactggtcagtgcgtcaattacataaagggaggaaggatgccaaattaaaagaagtgatgtgtgttatgttagtaaatatagaaagaactccctgcttctaatttctgtgcagagttaggaaaaatggggaggaccccaaaacaggtatgtggaatgctttcttcattttctgttaagctcaggaaataccactaaagtttaagtttgtgtgaaataggaagagtctaagtgagatgccaatggctcgtgtgtctgcccacgtgaagaaatccaacttatgaaaatggcatcatcatgaggaaacagttgtatgtggcacaggcagtaaaaccatcagatagcacccacctggtcacctccaactggtccgcaacaccaccagtattcccattatgtgtatgttacagcctttgtagttgtcccacaactacaaaatttaaaaattgctattgtcaaaaaaaatattaaatatgaaggcgaatatgttgttccacttttttttccccaccctttttgaactttcctgtttcagttttggaagtttctattgacacatcctcaagctgggggttccttcctcagctgtgtgcagtctaccagtaagcatcaaaagcattcttcatttctctaacagcattttttttctgagacagagtctcgctctgttgcccaggctggagtgcagtggcatgatctcagctcactgcaagctccacctcctgggttcatgccattctcctgcctcagcctcccaagtagctgggactacaggcatccgccaccaagcccggctaattttttgtatttttagtagagacggggtttcaccatgttagccaggatggtctccatctcctgaccttgtgcctgcctcggcctcccaaagtcctgggattataggcgtgagccactgagcacagccttctctgagggattttaatgagttgttgactttttacttagtgttagaacggagtcacaaattttaagcttgttatatgcctgacaggaagccagaagtctctaggaagtgacaggagaatgtgagctgcatagcaggttgaggatggagtcccaagtgatacaggagaaatgagtccatgtgctttggggactgcaggcctgtccagcctctgacaccctggtgagtcagtgcaaagattacagcagtgacagcaaactagcatgtctgagtccatctggcatctagtctcaggctggctgtcctcactcgttcctgggcataggccaggctaaccttgggaggaatttagtttatggtttgactttgaagcaggaatgataatagttcctccataaaactaacacccttactttgcccagggacggcctttgtcaaactagtgaaagaccatgagattaagattataggagggaaccgaattctgctaaaatgtaggcacagtttatgtaatccctgactgctccagtgtcatttggcaagagtttacaaaatttgtaactaattgctcctatagataacatcactattgtagaacgcgagactggtcttttgagatgtttctcattcttttgcattctggcaaccggctgacctcattcatacctatgactaatggctcagccagtcatgtggtccctacctagaggcagattcaagcacaaacagatcatttccctccgcccgcatgattccatcaccaaacaatcaccaaaaaatgagcagtactcaatttttagtcctgtgaccctgaaactgtccttgaaaatctctaacccctgctccactggggaggctgatttgagtactaatcaacctccagcctcctgtttggcagacttggagtcgttaaaatctttcttgactagaaaccaacatttcaataattttgtgtgtgtgtgtgtgtgtgtgcagaaggccagaagaacttgtctggcaattatgagtggatggaggaactgcctatccctgtcccattgtcttgtccacaggtcagcctcacaaagggaaagagcccttgaagggaatacagtagaagctcattctcttagtgacctggggacattggctcgagatgaagcctggcaggagtggcaactccaggtgatttctgcacctttcctatttcctgggaggtgggccaggccacagtgttagcgggaaaggaactgaacagccagactagtcagagggagtgtctggggaaggcctaggggtgggggaagaagctgtgcaggacagggcttgccagtcagaatgaagtgggaggaagatgagggacacagagaagaagagagaggcagagacaccatggcagtgagcagtgagggttacactgacttcagagaccccagggaccaggtgccccagttccacagtccaggaccaaggagcccagagaaccctctggtggccaaagagcttcagagttacatgaggtggggtggctttaggggcaagaggtagtggggggatgaaacgtgggtgtcagcctctgaaggacaagggacaggtgtggctagaacctcctatgattctgcatccaacatccagtctctaaagaggttttggatcattcatttcttcattccattccttcatttgttatgtgagagctcctgagtgtgtgtctctcgctgggcctgtgctggtgcagggtgtgagtggggaaagaaaacaaggtcctctccttgatcttctcatgacagtgacatgggcactttgggaaacacaggatttcaagttcagtgatgggggttaagatctgagggggaggcctggacatattttttgcactgactctgatggttgaggcaggtgatttagttctggagtgcagactaatcagctgaccatttgctctcactcctctgaggtttggatgcctaaaaagagaggatttgagccaataaatgactatggggtgcttggaacccagtaagccctcacttctggtggaggagaggaagggcctgtggctgcagacagacctcatgtgaccccgatctcccctttgtgttggtgtgactctggttcagtgactgtgccttcctgtgcctcagttttctctcaatcaaataagctaaatggcaaatggactgtggcttttcatgctatctgtgaataaatgttaaatgattcacagtcacctgacctaatgcttggcacagtggaggtttcacacaaacagcatttattattaatttgcttccatgagaaaacacctttacatcagatccctgtggacaatctgctaccaggtacatcttctccttctgtttctgcttctggggacattagactttctatggactctcctaagccgatgtcctacaaagcttgtctttctatcctctccactctgagtgtcaggtgaagaaagctctgtccttgcccagatgaggctctgagggctgagccctggctggtgaacagctccaggagacacagtcctctgacagctggtaaattcttggtcccagtaaggcctgcccaagaaggaacaacccagcactggcacaggctcctcagctttatctggagcaaggatttagggacagaggtctggggttgaggcttctagggctgagctgctctgagagtatctcagggggcccctcaggccagccctactcagttctccagggtctttgtcagcgtcaaatttatgaagagggcatgaggtgcttgtctgagactgatctcctcctgctgagtccccccatcagactgtccttcctctgcagcgagtgtctgcagggtctgaatgcgggaaaggaattctgatctgttgaaatttgtctcctctgtgtgtcctgcactaaatgcccaaaccccagcatgggacttaatgcagagagggacacaggcagagtccaggcctgagaatcctgtgtgtgtgaagtagaagtgacccctgtcccccaacacccagggatcatgtggaatcactcacggtgtaaggtgaaggtgaaatgtccagttactcctccagtcccatcgcgtcgctttatgatgtgtaaggtgtaggatcctgcatcctcctgcgtgacattctggatcagcagggatgcattggaatatactctttctcttccactgtatgcaggcccatatataattctttgaccgtctactacatatgatgtaatgtaatggtagaggtatgtcatttgccctttgtaccaaatgtagccagcaagattctggggcaaattgtggacaagtagaagaacatccttcccctcagaaactttgggtggctgggcttcaatcgtgacttgggcagttgtgggcggattccagaagtttaaaagtgatgctaggaggtacagagagcatcagttaatattgagacctatgtattggggtgaaaagatgggtcctgagaaggtctcttcaatcctcagccttgaagacacacaaacacacacatacaaacacatacacacactaaaggggcgtgagtgtatgtgtgtgtgtcctactgtcccactaggtcaagatcagcagcatgacccccattccttcaacacttctgaccttggcatttttctttttggattcctcttccccaggggtccgcacggccccctccacactgccctcaggtcctgctcacatcagggcatccttagacttctttcctgatacctccttcagagaccctgggtcttccctttctgacctttccctgctctcctccctccagggttcttgtcaacacctgatctcacattctagatcacttagcatgtctgtcttccccccacgatgactgtgtgagctccgtgaggacagggacttttgtgatcttggttgcaccccagtacctggaacaggcggcagactcctgtagatgtgagagttctcagggtctccaccctctggatgtttctttttccccccaattgttgaggtttcttgctgaggacagtgtttcatgtcctgcttatattttcatttgaagtgtcatctgatatagttattgttatcatttttcaaaatatggtggcccctgatgattaatcaggaaaacagaacacttaagattttcctaccacttaccaattccgcttcaatgtgactttcctattttgaccctctggtgtattttcccctatccaggctccaacagagccttctttcccttttcttcttttttctttttttccttttttcttttttttttttttgagacggagtctcgtcctgtcacccaggctggtgtgcagtagtgctatcttggctagctgcaacttctgcctcgtgggtgcacgtgattctcctgccacagcctcctgagtagctatgattacaggagcacaccactatacctggttaattttttgtgtttttagtagagacagggcttcacagtgttggccagactgatcttgaactcctgatctcctgatccacccaactcagcctcccaaagtgctggcttctttcatttttcagaaccccatcctctccaggagaccccatccagtcactctgcttcctcctcctgtcctctcccaggaagttctctcctcacctgtgagcaggacccccttccaggtgatgcgctgtgtgcagggaggggctgagaggggccccatggtctctgctgcttgtgtgttctcctctgtggagataagcctaggatccagaagcttcctgagtacggctgtcagctgtgctgtccttcctccttctgtgctgagcctcctcccggggcaggagcatttctcaagctcgtgggcggggtcaggcccaggacacctctctgtcccctcctctctcagttctgcctccttgtccctcctgtttttccttttgtctgtgtttcaggtccctgggaattgtggaggcctctgcatttttcagcagtgattctttcaccaaacctcaacacacactttgtgcagatgcacacacacacacacacacacagaagagacacacacgacccacatggtcacacacataccctgcaggttaggcaagcagagtcctgggcctcagcctcctgctgtccccatggctctggggtagggtgcacattcacgccctttaccctcttccttcctcatctggctctccccttcagtgcaggagctgcacaaggttcccgtcacagtgacgtcccattgtgctgtgggtgagctctgtgttgtctggtaagagggacccttcctttctctaatcgtgtctagcttggctgcagcttccaaggatgaacattcagtacctgggtttcccagaggaaactatccatcctggaggtgtgcagggtgaatctctcaggcctcttgggaggagaggcctgtgctgattgctcagtgggggctgtgaatcccagagtcaaagggacagttctcggtcactctgtgtctccctggggtctggcggctgagctggagctcagggtttctcatgttctccctgaccacctttgatgtcctctcttctctgcccagctgattgtcctgtggtcaccacaccttccccgtggtggtgcaggaggaagtggggagttacccaggaaccccgcgggacatggcttgttgagacgcaggagggggagcctgggacagagcaggggttcagagctggagagattcatcccgacttactccgtggccatgatgggctcagccctccctgtgctgacatacccaggggtctgtcctgagggttttgacctggccaagctgctctctgtagaggaggaacaggcagtggccagagagcctgtctggagggaccttgctcacacctgagagggcgggtgggggtgagttgtgttctgggagcaaagaaaaataacaccccccttctccccacaagcacacaggagaggtctgtcttcccaagggacagctggtggcaggtggccacatcccggatggtgcctgtgtgtgaccatcacacgctctctgcgccccctgggctgcagtgggcaggcaggacacagggtgcctggctgattcccggggaggctgtgggccctcaggcagccgctgttctgtgtcagcgctaggcttggcctgggatgccccagagaacaggacagatggagcaggggcgggcatttagggagcagtgacagaaagagttgatgaggatggagggaggtcacgaggggaaagcgtccagtgtggcgtcgcgtgcaccatcgctgcccgggagatgcctttagctgggcccagggaaggagcaggtgtgtggggcaggagctacctgcagagggagtggtgttaggttggcggctgcgggtcaggaaggagctgacagagtccgtgttgggagcatggagggctctgaagacttgggccgaagtgaccctggtgagggtggaccctgctgggctgtgggttccgctgagggaggttggcatcccctaggaaggctccaggctgggaaggactctgtcgccctctggtggacagggagggaagtgtgaacggcagcaatcccaggccaggctgcatgttttattccatgtggatctgcacactttacatgaggtcacacatatgttatgttacagctccatcaccttccagccccttgagtcccagtctgtgtgactctacgttcactgttctccctctttcacaatcagatgtcccaaatgcagatttttgtcaccttctgtgagtttgtgtttgtgtgcagtaggcagcactgtgtataccctgggggcagtgatgtctggggctgagcagtgcacgtgggcttgggagcagaagagggagcagcagggtgggaagatcaatatcggggggcagggacaagtcattttctttttctcactcccagggaccagaacccaggattctgactccagggcacagtaccacaccctgctggtgtccctggatgtcatgaggctcatagtgtcatgttgccttggcattcattttttaagatgtaagtttatttgcctcaaatcagaggcagggcttggtcaccatggcagttttcaatactgtatctggttcaagtgactccagttggtgtgcagagataaaatcttagaggcatctctcctgcttggtgtgctggactcccctctctgcagctgcttctttaaactgataattctgacattcgccttcacatttaaagtgacctcctctcagtcacagcgtgagctcctggtcccagtgtttgttgcttgctttgaacacatccattaaagctccctgctggaaacctgtcagataacaccctggacttaataaagcctgggctcactgacctctgtgtctgtggtctccaaatgtgccgagggctccctagtgtctgtaagtagtacaagaacatacattttcacgttgtggttgtatcattgtagcctcacatgccatccagagcctgacattgaggctgtcctatgggacctgtgctggttgagcccctgctggagctcttgttttggggcctctggttctcctggatacaggagcttccagctaacttgattgaaaactgatgcctttcattgaaacactggctcagatgatggattcatgggcttcagctgccataacaaacaccttagcctgggtgaattaaataatagaaatctatttttcacagttctgtgaataatgtgctattttaaccactttaaaatccacgatcaagtgaaattaaccacatacaccatgttaaattaccatcaccactattttccctagaaaatttttatcattttaaactgaaactttgtatcttttaaacaataactctttgtatgttctactctagaccttgatcatctctactctgtctctatgaatttgcctattcttgatgtttcatataaatggaattatacaatgatgttattttgtttctgacatatttcacttagcataatgtttccaaagtccatgcatgttccagcgggtgtcagagcttcattcctctttatggcagattaacattctgttgtatgtgtcaccatatttatttattcatgtgttgatgaacacttggattgttttcatattttatcttttgtgaataatgctgcaatcaacattcccatgcaagtacctgtttgagtccctggatttaattttttgggtatatacctaggaatgggtgttgtttcaaatgagaattctgtgattagctttttgagaaacagcaaaactgtttctcctagtggctgtaccttttatattctcaccagcaatgtatgaagatttcaaattctacataatactgctacttgttatttaacattttaaaagaatgttagccagttttgtaggtgtgatgtggtgtctccttgcagctttgactttgtattttcctaatgactattgatgttgagtatcttttcatgtccttcttgactatttgtatatcttctttgaagaaatgtctatttgagtcttttgcccatttataaattggatgatttgtcctttctttattgagttgtagctagttcttgatattatctggacatgaaaactgcctatatgtggtttgcaagtattttctctcattcggtgtctattaaatattttcttgataatttcctttgatgcacaaaaggctcacatcttgataaagcccaatttatctttttttcttgttactcatgcttttgtatcatatctaagaatccatggcacatttgaggtcatcagtatgtacctctgtgtctattttaagatgtttttatggttataggtcttatatttaactcactgatcaattttttagagaattgtttcatatggtgggaggtagagttatttaaattaactgttttgcatgtggttatctagtttctgcactatcatttgaaagaagaattgttaatccattaaattgtcttgacaccctcttcaaagagtaattgatcataagtgtgagggtttatttctagactctcaattctatcccatttgtctttatgtccattcttttgccagcagcttctgttttaataattgtactcctttgcgaggtttcaagtaaagttcaagcctacaatttattttggcaagattattgtggctattcagtgttccttttctgaaaggtggggaggccaatgtttcaccattgggaaagccttttctgtcttcttcagggggaaatttgggagaaccttttaagaaactttatctaagtaggtaaactctcaccactttatttgctgaagtgctatgttaaagtgtgcattgcctcttgtggaagaattgtgagaccctggaagcacctgcccacgtggtgagagacagtgaattccatgatgaggggcagagaggatgttgttttgtgatacaatgttgttggggagttgtatacatctctatttctttgtctctgtacagtgggtgtagggaccagccccacagggtcggcgggtttttctccccatgtgtggagacaagagattgtagaaataaagacacaagacaaagagataaaagacagctgggcctggggaaccactaccaccaagatgcggagatcgttagtggcctcgaatgccaagctgtgctgatatttattggatacaagacaaaggggcaggataaggaatgtgagccatctccaatgataggtaaggtcacatgggtcatatgtccactggacagggggcccttccctgcctggcagccaaggcagagagagagaggagaaagagagagagcttacagcattatttctgcttattagagacttttagtactttcactaatttgctactgctaactaaacagcagagccagttgtacaggatggaacatgaaggtggactaggagtgtgaccactgaagcacagcatcacagggagacaggcctctgaataactgcgggttgacctgactaatgtcaagccctccacaagaggtggaggagcagagtcttctctaaactcccccggggaaagggagactccctttcccggtctgctaagtagtgggtgtttttcctcgacactgaggctaccacgacatcatggttcgcctggaaaccggcatcttcccagacgctggcgttaccactagaccaaggagccctctagtggccctgtctgggcgtaacagaaggctcgcactattgtcttctggtcacttctcactatgtctccccagctcctatcgctgtatggcctggcttttcctaggttatgattatagaccaaagattattataatattggaataaagagcaatgctaccaactaatgattaataatattcatatataatcatatctaagatctatatctggtataactattcttcttttatattttattatactggaacagctggtgtcctcggtctcttgcctcggcacctgggtggcttgccgcccacaagtgggcatctccattggacacagtaggttttgaaatccttgtttatcctctggggtctgggtcttggcttacctgttagctgcagctgaaagaggtgtctgctaagtcaatgacacctgtggggagaagaaggattcagcagagtgaaagtagctggggctcagagaagccaggaaagtctgactcttagaaactgtgggtcagcagatgggtgtcctcagggataaatgggccatgccagtagccactgcagtgaactggaagaaggtaagggatgctgggtatcccatgttctgtctcagctctgcagctgaagatttgggccctgggctggtacggccctgcagcaggggaagggtatacaggaatggctgcatatcgggacaaagtccatgtcatcttcttaggcattgttactgcagatggaggattgtgttcagagacctggcctaaacacatgggagggcccaccccattcttttaaaattattttaagagaacagtattagcaaatgtggtacatgttttattctgctagaatcagtcttactgtcacgttttacaatgtatctcttaggaaatggcaagagtcatccacacaatgtgcatttaaaggggactctactataatttcagctttcctactctttatagaaaccatcttctctgcaaacacacaggcaatatctctgtattcatttctattgggagccctgtatgcaaggtggagagagccacatttcccctgagattttacgtaaaagtttgaggttgagacgacatatctgacactctgttgttatcctcagaagctactacatgtgaaattctaatgactgcattatcctgccaagtgaaagaggcaggcatgagcaaggacagttaagaggggtgagagcctcatcatgatggggagtcttgttctgacatcttgggaaaaactgtccacagtgtgaagtcatccacttgttgtcctggtttacagtttgagcagctgttgttatggtgtcgaacattttggtgagttctgagtggctcacgcttcaggtacaagggttttcccatgaaatttacattgagttgtccacctcccgcttataggacttctggaacagagtgggtcttgctcttcgtgattccatgggagaaaatggaattggaggaactagtagaattcagggtaatatccagtctacaggtagataataaaaacacagaaacaatgaacaaagttgcaatctcataaccggtgtactacggtttttattttccacattatttttctctctatgggcatctctagttttaccaatgataatttcagtagaataaatttgtttgcaaaataggttgagtttcttcaaacgtggtctgattctttacataagtgcagcaagagtagcaatggaccatgtaggatctcttttaaaatttttctttgctctaagtttttataaggaatctcagattaaacttttacaaacctcttgagaataggaagccaaaccaaggctgagtttagactttgcctgcagttcatactggttcattctgtctatattcttaaatataacatcccagtcaaagccttggtaatataaccaatgatttgaaatgtgtcctgttacaaagagagcagattgttgctgtacttgtgcaaatatctgtattaccataaacatatcaatactcatgaatagttgcccaattctggggcagtcaggtagagagcaaaagtaaatgtttcaattacagttcccagaagtatagtttattgaactgctataagctatagatagattaaaagaaaaaaattccataaatctagaaaacaaaccatttaaagaatcagcaaattttcaaacaaaaatcataaaaacattatcctcattattatcaattgtttcaatgaaatcagtgtttttcctgcttggtataggctgggaattttaagaagatatcagcctgtttcttaaagttttggaagttcttagacagtccagtggtataatctgaaagttatcagaaacttgtattaaagagttcttgtcagcatcttttccataaatctccttgaaaaggaagcagttttggactgtagctgattggaaatgctttgaggaagaataaaaacaacatctgtgaatgacaaagattttaaatgactatggtttaaactctgatgataattcattatgataacacagctcacaaaaaaagttacttctgtggtatatgacattatggctgataacatatttaatttctaggaatctcatacaatttctggaacaatcatatcagtaacatatccattaatataacatagagaaagtttagcatcctttaccacttatgatttgaaaatgcttttcatataattttacatatcaaataaagtggcttttccatgtagcttgtgtttctcagcaggattactgaggtctttgtggaggccattaatgaatagggccaggaaagtataggctcatgtatgctgaaaaatttccctagataattccaatactcccagctaataagcattaatttaggtctaagttttacctattagaacagctgttctttatcctggttacacattagtagcatctgggaagacttaaaaactaacaatgcctgccagatgcagtggctcatgcctgtaatcccagcactttgggaggctgaggcaggtggatcatgagctcaggagatcgagaccatcctggctaacacggtgaaacactgtctctactaaaaatacaaaaaaattagccgggtgtggtggtggttgcctgtagtcccagctacttgggaggctgaggcaggagaatggcgtgaacacaggaggtggagtttgctgtgagccgagatggtgccactgcactccagcctgggcaacagagtgagactctgtctcaaaaaaaaaaaaaaagttaccaatgcctgagtctcactttagaccattaaattggatcctctgggtggggcttgggcatccatttaaaaaaatgttttctggtgattccaatgtgaagctatatttcccatcagatttctctgatttcttgtggcattcactttttttctattttggtattataattatttttctggtcttatcatctatcttaggctttatgttccttggggtagaaaccttgccttcttcatttctgtatcgttcatgaacatatgagttggtcatcaggaaaaggttctcaatcacatgtaggttgtgttctgagtctcaggtttacacattaatgctggagtcattttcctctgggaggtcagaggttgcttttgatgaagggtatgggtaagcccataatgcagatggtagatgggagatcacactgtttttagccacggcattggaactaagcattctatgtgtatatcaggtggaagggaagggatgtgtagacagacagatttaattagaatggaggaattacactagggaatagaggtaatggaaacagtaaaaattagtaaagagaagaaatgtgaacttatcaaataggcaagagtcgatctctgaagatttttgaataggggagttaactagaatttaggaaggtaacaaggcagtcacacacaaggaagatttcaaagactggaggtaagtcaaacagtacctctagcagttattgaggttgtgggaatggagagaatgacacaagtgagagatgttaaaaaaaaggatcaagaaggttttataagatattgaatctgggaaacaaattagcagaggttgaggataatcatttgtaggagacagtggggtacagggagcatgaagaacaggggagaagagacctgcaggaataaatgctgagaagcaggagtttagtgggaggaggaggagatccagtcccaaatactggcaaagaagtcctttccctctcccaagcaaggcagtcagccctgcaggaaacaggacaaaaggaaaggccatcataccttccagtcttcctgaaataaactacaccagggctggtagatcagagccacactggccagtactccaatcaggatgccgacagtggctctacctgaaaggccaggagtacttcttgtactgaagtatctgtcatggaaagaaaagaagagaaggaataaaggtgatgttattttacagtgtgctaccttaggaaccatcactaagtatgaggtagtttctacttgttccttcagggattaattttgtgggagggttgctggtagatgattagccaactatattcttgcagtttttttatctctcaatgtgtttctaggttagtgatcagtcttctgtcaatttcatcctgaccatgctgcactcagacatttttgaaggtatcataaagatgtgagaaaggctgactgctattttctgtgtcattagaactttctaccctttcgtggttgcatctttttctcagtgtgtcagttgtggtaggcatgaataagactgtcagttctccatggcagcttgtgtttctcaaaaggattactgagttcttggtggagcccattaatgaatagggcccagaaagtataggcttatgtatgttgaaaaatttccctaggtaatcccaatactcccagctaatagttgattaattaataatcaattgacttgattgacagaaggcccagatcagtgcattccaaattgacaacctactttgcatagagtcctcactttcctgaagctcccagcagggatatgaaagcaagccccgttctgcgagattctgttttactctcttgggtgactggtgggaggactccctgtcagccttgccatgctctctttgaactgaagctaaatcttctttctctttctccctcacaggagtcagatttgcatagtgctctcaaggctctcccagacttttttcatgcctgccccactttccctcacaggcatttttcctaatacattatcctgcatgtctaatctcatcttggatgcatctcagtgggtataaactaacataccaggcttgatttttttgcacttagcttttttctctctctcccacatgtagccagtaactgtgtcctagtgttttatgtgttacctgttttttcttgtgtataggaaaaatatatatatttccatatacttatttatatataatatataataacaaaatatataataatataaaatgtataataatgtaaaacatatacacatttccatatatgtatatggaaaaagaggtaacacataaaacaccaggacatttatatataataaaactgacatattttatatgtgtatatatatatatagtatatatatatatatatatgtgtatatatatatatatgtgtgtatatatatatgtgtgtatatatatatgtgtatatatatgtatatatatgtgtgtgtatatatatatgtgtgtatatatatgtgtgtgtgtatatatatatatgtgtgtgtatatatatatatatatatatatatatatatatatatatagtgtctggtagtcttaacctctctataaatacacactttttgtcactgccccttccctcccatgcagagctcccatggccaaatctcctatttctccaagtgtgtgtccctcactgtcctctgtgctgtgtcccatgtgctgtgtccacagcctcctagtgttttatgtgttacctctttttctatatatacatatggaaaaagcatatacatatttatctctatatatttatttatataaaatatataatctaaaagtatatatatacaaccatttaaaatatatacatatttccatatatataaaaaaggttacacataaaacactaggccatttatatgtaaaattcacatatgtaatataaatgccaattttatcatatataaatgataagtatatacacgatagacttatcatatataaggtgaatttggaatgctctgacctgggccctctgtcaatcaagtccctgccatggaggccactcattgctgccacaactgagacaccaagagaaagatgcaactatgaaatggtgaaaagttctaaagtcatagaaaatagcaatcagcctttctcacattccaaatccttcaaaaatatctgagtgcaacatgtccaggatggaatgaaaaacttcaatcttgaaaaggaaaaaggaagctggaggactcacactttcagatttcagcatctactgcaaagctacagtaatcaatacagtgtggtactggcataaaggaggacatagtaactaatggcatagaatagagaacccagaaagaaagcttgcatatatggccaaatgatttttgtcaagagtgccaagaccattccatggggaaaggacagtctttttaacatgtgataccgggaaagctggctatccatggacaagtatgagttgaacctttacctcacaccatatccaaaaaaatgaacccacaatggatcaaagacctaaatggaagagtgaagactaccagactcttagaagaaaacatgaggaaaaagcttcatgatattgaatttcagaatgatttattagttataactacaaaagcataggcaacaaaaaagggataaattggacttcatgaaaatttaaaacttttatatatcaaaggccattatcaagaatgtaaaaaggcaaactatcacatagggaaaatatctgaaaatcatatatctcataagggattaatttccagaatacatgaagaacactacaaaccaaaaacagcaaaaatccaagaacccaataaaaaaatggagaaaagactaaaatagagattttattaaagaagatatacaaatggccaatgaggacatgcaaggattctcaatattaatacttagagatatgcaaatcaaaaccacagtgatacatgacctcacacacattagggtggctttgataaaaacaacatgaacaacaacatcagaaaacaaatgttttcgagtacgtgggaaaattgaagctcttagcgtattactgatggcaatgggaaatgttatagccactgtggaaaaatggcatggcacggccagctcacgcctgtaatcccagcactttgggaggccaagatgggtggatctcttgaggtcaggagtttcagaccagtctggcaagcgtggcaaaaccgcatctctactaaaaatacaaaaattagctgggaatggtggcatgcacctgtaatcccagctactcgggaggctgaggcatgagaatcacttggacctgggaggtggaggttgcagtcagccaagattgtgccattgcactccagtctgggtgacagagcaagaccctgtctcaatatcaacaacaacaggaaagaaaatggtatgtcagattcttaaaaaaattaaagaattaccacttgaaccagcaattctacttccggacatacagccaaaagtattgaaaaaaatttgaacagatatttgtacactgatgttcacagcagcatcactcacaatagccaatgggtggaaacaaccgaaaagtctattgaaagataagtgggtgaacaaaaaggtatatccatgctttggaatgttcttcaatcttcaagggataaaattttgacacatggtgcaaaatggatgaatcttgaagacattatgcgaagtgaaataagccagacacaaaaggataattattatatacttccatttatgtaagatagttagaatagtcaattacatagagacagaaattagaatggtgattaccaggggttaaggggagaaggaatgagagttatcatttattgggttcagaggtttagtatagtaggataaaaaaaagcactggaaatggatagtgttgatagttacacaacactaaatttcacgcttagaaacagttaatggtgagtcttagatatatagtgtctagtactcttaccctctctataaatacacactttttgtcactgttccttccctgccatagagagcttctgtgagttaatctccctatttctccaagtgtgtgtcactcactgtcctctgtggtgtattccatgtgctgcgtccacagactcagagaggcagtgacttcagagccaggacacagccctattcccattttttaaagccttactcatgggaggcttggcttctactggcagctcgatttagccagattcagaaccggccacccaggcaccttatccacatgccctggccccagcccgggtggagtcagggtagggtcagtcactgggtgagcccacagcaatgcagggagcagagtctgagctgcttctccctcacccaaggggcttcctcctctcatttggggaaaagtgtgggcttgttttgaagcctctgatgttcatcacagctcatggagtacacacacacaaaggagacagaagggatattttggtgacagaaacagcttgaccatgaggaccctcctctttctccctccatgaaggcccttatactgcatagtgcttggggctgataaagccatttccctacatttctcaggctggacccaaggtcatccaccagaaatccggaaaacaaagggaagagaatctgtagatatgaattgggagggttcaggagaaaaatttggatttacttttgtgcatgggacacaggctgagaataaaaatgttttcctggctctttcttggaaagccagataggcttcacctgaaagcatattgccaatgctccagcgatccacttaccagggactgtgattttcttggttgcgaagtttttgccattagtgactgggttatggacataacacagatagtccccactattctctgtagtgacttgggagataaagacctcttgtcctgtttgctggttattcccattcagcagccaagaatgctctactgatgggttagagcccgcaaggcaggagacattgaggtttgaccctggatagtaaaaggtgtctgaagaataagttgtgggttcatctgggccatctggagcaaagagaataaagtcacaggtaatgttatcagagggaatgggaagctcctggtctgtgaaaggggcacagtgttcctttttgccaagtcacaaccccaaagtcccagccaaacttcctctgtgttcactgaactggaggagtcaacgacattcacctgtttctcccatcacaagctgtggaaccagagtctcctaagaccagagaagcccctcccttcctgggcctacccaggtttgcctggggcagcaagtcatggccagcttgggggtctaggggtaagtgtattcatacttggacctgagagggactgagaggcctggcctcgtgttatgtggatttgggctggcagccttgtccatgaaggaaaagaggatactcacagagaacatccaggtgactgggtcactgtggctggtactcactacattcttcctttgacattcaaagagtcctgtgtcactccttgtgacactgagtagagcaaggatcctgttatcattggacatctttagcctgggactgagtgtgagtctatgactatttacccaccacatgtagattgtgccatgagtctcaggttcacaggttaagaccacagcctcctcatcctccgcggggttgctggtgacatagggcttgggcagattcactgtgcagataacagataagattcctctgtgtggcgctgtgtccggaattggtgggttcttggtctcactgacttcaagaatgaagccgtggaccctcacagtgagtgttacagctcttaagttgacgcttctggagtttgttccttctgatgtttggatgtgtttggagtttcttccttctggtcggttcgtggtcttgctggttcaggagtgaagctgcagaccttcgtggtgagtgttacagctcttaaggcggcgtgtctggagttgttcattcctcccagtgggcttgtggtctcatggtctcgctggcttcaggagtgaagctgcagaccttcacagtgagtgttacagctcataaaagcagtgtagacccagagtgagcagtagcaagatttattgcgaagagcaaaagaacaaagcttccactatgtggaaggggaccccagcaggttgccactgctggctcaggcagcctgcttttattctcttatctggccccacccacatcctgctgattggtagagccgagtggtctgttttgacagggtgctgattggtgcatttacaatccctggagctagacataaaagttctccacctccccaccggattagatacagagtatccacacaaaggttctccaagtccccaccagagtagctagatacagagtgtccattggtgcattcaccaaccctgagctagacacagggtgctgattggtgtgtttacaaaccttgagctagatagagtgcccattggtgtatttacaatccctgagccagacataaaagttctccaaggccctagcagagtagctagatacagagtgtcgattggtgcattcacaaaccctgagctagactcagggtgctgattggtgcgtttacaaaccttgaggtagacataaaggttctccacatccccaccagactcaggagcccagctggcttcacccagtggatcccacactggggctgcagatggagttgcctgccagtcccacgccatgtgcccgtgctcctcagcccttgggtggttgatgggactgggtgctgtggagcaggaggtggcactcctcagggaggctccccccgcactggaggctcgggccgcacatggagggggtgggaggctcaggcatggcggactgctggtcccgagccctgccctgccagaaggcagctaaggcccggtgagaaatcgagcacagcgccggtgggctggcactgctgggggacccagtacaccctctgcagccgctggctcgggtgctaagcccctcattgcctggggccagcagggccagccggctgctccgagtgcgaggcctgccaagcccacgcccacccggaactccagctggcccgcaagcgccacgcgcagccccggttccgctggcgcctctccctccacacctccctgcaagctgagggagctggctctggccttggccagcccagaaaggggctcccacagtgcagcggtgggctgaagagctcctcaagtgctgccaaagtgggagcccaggcagaggaggcaccgagagcgagcgagggctgtgaggactaccagcatgctgtgacctctcagcaccactgatttctccatgagcattttccaatcacagttgacatctcccacctctcagccaatccatgtccttaaaagcccacagcaggtctgtgtaccaaaagacagatggatgcatgatgatctgagggctcagaggccatggggccacctgctctgtgtgggagatgcatagacttctgaagtgtgaatcgagcagcaatgttggtgaagtgtgaattgagcagggtcaaacaattagagtttaattaactttgtttaaattgggcagagtacaagtgaggcagcagtggctcatgcatctccccaaacgaaggaccacaccttatgacaatgttgttattatgaatacacaggtgtgtatgaaacaggcagtaaatcagacagcacccacctggccagctccacctggtcctaggaaccaccagtattcccattatgtgtatgttacagctttttaggctgcaaaatataaaatacaacttcagaatataaaatatgctattgttgatacaaaatattgaatatgaagctgaatatgttgttccactttttctcactcttgttaaactttgctgtttcagttttggaagttcctattgacacacacttaagctagagattctttcctcagctgtgtgcagcctacgagtaagcccatggagggcattctttatttctcttaaagtgtttttaatctctattatttcttttccttctttcttagaatagccatctctgtttaagtcacccatctattcctgaaaggtgtctcctttttccatcataatccttaaccagagttgttttaaatttccagtctgataatttcaacatccctacaacatctgtgtctggttccaatccttgctctgtctttcaaactgcattattatttttttttttttttgccatagtctgtcttgtatttttttgaaaactacacatgatgtactgggtaaaagggacttgagtgagcaggcattcagtgacatggtggtgagtgtggcgagggaagggttctgtggttctggatgaggtctgtgtcctgggctgtgaatgtcacaagtgcctctcaggtttttctttccattaggtgggatatgatgacttgaggaggctggagttggatatttcccctccccctggccagttaagctcccatcaaaccccagctaattaggctgcagtaaaatagtttctcttaaatttaggtcttaccaagaagaatataattcactgacaactttccaagtgtttttttcccttcttcctacaagaaggatgcagggattcttgtttgatattgactgtgagaacctggtagagctccaggagctaaaagtcataaaactgtccccctactcccaagactaatccatccactgttgtgtttatctctgcgctgtgtccacactgagcctccagaatttcctcaattagagttcaggttttctgaccccagcactggttcccactggggtttctgtgcctatgtttctgctcaggtacggtgcactgctctgtatttgcctgtgggtctctccaatatgtggtccagttagcactgagaacttgcttcctgagaaatctaaacgagttgttgatttttcagtttgttcagctttttacttgttgttagaactgagtgaaaatttttaagctacttacatacctgatggaaattcgaagtctctagggcatgactggaggatatgagcgccacagcaggttgaggatggagtcatgagtgaaatgggtgaaatgagcccgtgggctttggaaactgcagatctgtccttctgcctctgaccccctggtgagtcaatgtagaaagtgaaaccacctttgcaaagcatatgatgatgagagaaagctagcttggctgaccccatgtcacccctagcctcaggctggctgtcctctctgattcttgggcataggccagggtaagcatgggaggaatttatagtttaactttgaagcaacggtgataatagtccctcctgaaaattagctccctccttgtcggggactatcttggtaagtctaagaaaagaccatgaattatggaggggcccaaattctgctaaaatgcaggcatagtttctataatcccttactgctcaggagtcatgtgtccagaggtcacaagatttgtgaatttcctagttgctcctatagatagcaacactattgtagaatctgagatttatcttttcagatgtttctcagatttttgcattccagcaacctgctgacctcatctagactcatgaccaatggctcaaacagtcatgtggcccccactcagaggcagattcaacaaatacagaccatttcccctaccggcatcatttcatctttagccagtcaacagtacttattccttagaactttgcccctcaaagtttttgaaaaactctaacctctgagccattggggaagctcatttgagtcatgataaacttctatcctcctgtttggcagccttgggctaagtaaaaccattgtttactgcacatcgccttctcaataaattggctttgcctgtgcagagggcaagaacatgtcaggtgattataagaatggatggaggagccactgatctctttctggtggcctgtttcatgagtcagcctctcagagggaaaaagccctggactgggacacagtggaagctcattctcctgttgacccggggacattgccttattatggagcctggcaggggtggctgctttggctgattttggtgcatttttcatttaccagaaggcaggacgggcctcagtgtgagcagaaaggaaatggaacagtcagctttgttagagagggtgtctggggaagtcctcagggtggaggaagctgtgcaggaaagggctcatcagatagaatgaaagcgggatgcacttttttcactgaacacctttcagacatctcaccaactctggcctcactgggctgtgcctttcctcctgagccctgagccctgattcctggcagggagggagaaagagaggaagggtgaagctgggatgtgtgctgtccaggtttcttccatctctggaatcttgacagtgagggaccctaatgtgttacctcagaggagaccgtgggaaaaagctgtttcacaggggtgcctggcttatgaagtgagggaaattcagaccgagttggactcatgaactactgggaccctgtcccatgtcagcaaacagcttttctagctcagcgtttctctctgtggctaactcttttgtgtgatttctgagcccatgctggagtcctcctcatgatgcctgatggtcagacctgtgtggggagacctaatgatggggtgggggtggtcttgagtgtcacacagagtgtccagggaacaggctttgtgactttctctaccccagccccacaacaagatctggatagtgggctgggtcagataaagtcagaatccatggggaagggtatgtgtcctggcagtgccgaggttcgtgcctccaggttagctctcagtttctgcaaatacatttatgttgtgcatgtgctgtttcctggactgtttcatgtccttaaatccttgaacctgtctgcagataatgtcatgagaggtctgcatggaagtatataagggctatctgattagggtgggtgtgttttacatagtgggttttttttttcaccaaacacttttcaaaaaattgtggttgagtgtatatatagaaacacatacatacttatattcattagatgtgagcatatattcatataaatttaatatgtagatacatatgtctataaatatacacatatatgtgtgtatgtatatgtgtatatatatgtatatgtgtatatgtgtgtgtgtgtgtatgtgtatatatatatatatatgtatatatatatatagtgccattttaaccacttaaggggagagagagagagaagagagtttctgctaataccaaatctgggttaaataagggtggtcctatttcctggggttgggcttttgctacatgtgtcaattcctgttggaagtgagctagagaggttacatgcttaaccaatttagagattttctatatgaaaatcatctgtgagcacattgataagttctatcctttcctaggtgaaaagcttggtgtaggattttaaggacttcccattggctgaaggctggcaaatggagtttgccatcctctgactacagccattctgaggactggaaagaataccctgagaagtggcctattttatttctgcaggaaggtactgaggtttaatttatcttatggagtcttcctagattagaaggctttgaggtgtgttgatgccttgccagtgacttagctgcctgatcagcgaacctatttcctttggctacttcatctgttccctttttgatgttccctataatgtatcactgctacttcacgtggaagaaaactgaggataataacctgttaattttttggtgatatttcataggaaatccattggtggtaagaaaatgccttttattttaaatggcagcatgagcatgaagaactcaaaaagcatacttggaatcagtgtaaatgttagctacctttcccttgcttaatttaagtgttattttaataactatttgtttagctgatggagcatctgcacctgaagagagatgttatttagagtgactactgcttatcctaccttatgtatttcttgctttaccagctgattgttagctaagagctccctctagaggaaagtaattttgccacattaagtggaggtgtaaaccgttttttcctagggttaatttggaggcttttctgattagtagagctattgtgacagtggtttggaagcagatgtaaaaaataggtcctcctaactgcaaataagaggttgagaaaaatattggattagaatttttcctgagacaccccttatggttgtgctatgggaagaggggaggcctggataagaaaggagaaaagagagagactggatctagtgtttagaaggaggtctactttccttcctataatttccagaatcacctgtgtgtcctgtgctgtaatggcagtttgagctgctggggccaggggtttgagccccaggacccatcagtcctgctggaccactgtgagactggttctgaacccagtgacctccatctctgggagcagttgcatctccagcggtctccaccacaggctggacagggtcaaggtggcttcctcttgctgtttggacactccttcctcaaatgccctggcttgccacaccgagagcaactagtggatacacctctgggatcctggacttgcaactctgcaaagcagctactagaggctttgtccttctcttgagcattctctctttcttctgggccttctcctagtccctattataaaagactgaagtggctacccttagaaggttttccaaggtgctatctgctactatagcttgccttttataggttccttctaatattgggagctttctgtataataaaacttatcttttggaatgggctgtcacttgactgaatcaggagataaaaaggtgtgcactaatagtgcccctctcaacctatccataaaggctgcaggattctcatctggctttgagtctatcatagacagtttagaagaattaagaggtctggccttagtttttcttttccattgatctgcagagctattggggtttcaatcagggttgtcaagaggtactgcttcacttcttatttggagtggtgtttctgctatttcttcactttctgtatctccttccttcccttttggtgtattataggagatatgttgctcatctccaaaattctctgctgcttgcagagctgcctgtttttcagctacagttagggtttggcttaggagcagcataacatccttccatgtgaggcgaaacacctgacttaaattctggaaagcttctatatacctatcaggattgtctgaaaattggcctaagtcttactttatttgcctaaggtcctgtaatgagaagggaacttggagggaccccaaattatggagattcttctcagatggttcccttggaagttgcttttctaatatgaggggattattctttataggccttcctgatatggctgttaaaaaaatctgggttgctgttacaatgcttgtaaaggtttagtaaaaatgccctgtcattgtacaaaatagaatgagttgcttttctcttgaaagtcctgaggttaaaagagttctagtgcctcagagtgcactccagaggggtgcaagctgaagatgctctgttagccatctagaaaaagaagtgagaatgaaagtgtccttatagtcctccttctttcattgtgacccacagtggagtggaagacagtgggagcgtccccccaaatgttttctctccttggttcctgagtcctggcactgtcttaaatgtgccgcccatggttgtaggtgtggccctgtaagccatggaactggataaatgaagtgatgggattagccacactttacccatgcaaccttagcttatctgcctgtgatctgcctggcttcctgaaaaatggatctctggagaaactgtagcagttgcctttgagcaagctttctttaagagagggaatgtgccagttgccagttatggcccgtgctaaaatatttaccctcagaaaagtggtcctggttaactctgttcttaaaatatccttactaattaaatactgttctaattggagatagaataagtaccttaaatgaacgtagggacctaatggcagtttttcctgctgatgggacaatattggaactaaaatttggctatggaagacattttacctctaactgttgaaagcagagttttcccattcacagaaagggcttttctatcagtgcaaaaagagacaattggaaaagtgcagtgttatggcaaaggaccaacgatgtgcctcatgaggaggatttctgtttccactaggtgacactgttggcttagaaataccatgtgcttaccaaaggaaggagagagagacagagagagagggaggtacctattgggttagttattatagcatgtaccgatccttcctaacagaagtgtttccctgaactgtaaaaatttctacatattgcatacacagaaagaataggagacatagagacaatggatagaaaggaagaacaaatttgcaacaggatagcaaattaggagacccattaccaacatctggatgggctgtcggaggctgtgttcagtccagaggcctttgaataacatcagggtgtgtcctggccagaaattctcagctgctccaggacatcccccagcctcatgtgatggtgaggttctccatgaaaggaaactagttggaagagaaccttgaaattaaaggacagatttgaggtttgctccatactcaccattctgatgtttctatcttctcttctgatcacaatcccagatgagaactcccaaataaaatggctctgtttggtaatctatccattgttctttgtcacacactgaaaaagaattcaggacatggaaacacatgaggagtgggtttaggagtgaaaaatttaacagacaaaaaagaagagagagagaaaaagctttctcatattgagaaaacagtcacccaagagaaggtctccaatttggggtggaatgtaattgattttgtacagagacttaaggaggcagtgattgatttacatagggtccaggggattgttttgaccaggtgtgccgtttaaatagcccgagaaaagactggccctcccaccctaatcttttattatgcaaatgtgacttctacctggtggtcaccatgacacctgcacatgtggtgacaaggaaaaaagggcaggaaccgccatattgggagtacctggctcttagttgcctgcagctatatatgcatatctgtgcttgcagcctgatcattcagtctgttttctgttagaaatggtttgggggctgctttttattaaaggaaaattccaccaagaattcttttaccctttctagctgcctaaaaataatttctcgataactcctgtattaggacccctttaggaaaacagaaaagatgacacagactctcctgtaggggagtaaccatagttttttttctcatggaaccccaagagttgcaagtgaacggatttctctcaggtctaaaactctgctcttttctccactgtgttacctgacctctttgcctgttacattactttgtactgtaaaagtatttgaccttgtgtgtgtaatggttgctgggtcagtgataggagctatggttttgaaggtgactaacagtggttataataaattattctagcttcagaggactactcatttctttgtatgtttagatgcaaaagacacagtttaaacaattaaggaaatacctttgtagcaaagtactctgtggaagtgttgcaaagtatggtccccattgcattttcctcttcttggggacctgggattcagtgaaatccttgatttttaatgtctaaatgttgtcccttccaactggttctcttttttacatatttaaatgattagaatctaaaaattgaaaagactttgttggccctcttccttaatgggctctatcttgagcacagtgattcagttgaagaacagagaccaaattaaaagctacgtctctaaataaaaaacaggtgctgcagaggatgtggagaaataggaacacttttacagtgttggtgggactgtaaactattccaacccttgtggaagtcagtgtggtgattgctcagggatctagaagtagaaataccatttgacccagccatcccattactgggtatatacccaaaggattataaattatgctgctataaagacacatgcacagatatgtttattgtggcactactcacaatagcaaagacttggagccaacccaaatgtccaacaatgatagactggattaagaaaatgtggatcatgcacaccatggaacactatgcagtcataaaaaatgttgagttcatgtcctttgcagggacatggatgaagctggaaaccatcattctcagcaaactatcacgaggacaaaaaatcaaacaccgcatgttctcactcatatgtgggagttgaacagtgagaacacatggacacaggaaggggaacatcacacaccagggcctgttgtggggtgggaaaaggggggagggatagcattaggagatatacttaatgttaaataatgagttaacgggtgcagcacaccaacatgacacatgtatacatatgtaactaacctgcacattgtgcacatgtaccctaaaacttaaagtctaataagaaataaataaaaccccatggtaaatttctattatttttgtgttaccttggcatctttttaatcttccttgaacacaccaaattttttcttgaaaaagcttaagttctctctctctctctctttgctttgagatgtaaatgtgctatgtattttctctaaaacttggtaaagccctcctcagataaatgttaacctttaccatttacaagaaagcaatttgaatccaactatcctttaaaatgatgggttttactgatgtcatacctaaagccctaaaatcaaaattctaaaatctttttgtctctatctttatgtgaacatatatatgttatatattttatcacatacatgtttatgtcacacatttatatactgttgacacatagtatcaaattaatgtaaaaataaatgggtacatacaaattaagtgaataagcccaaatgcttttctatacatgtgattttagtaacctttggtgaatatagatagttttaaaattgttggtaaaataaagtagaaatgtcttcataatttaatttatacgtttttgcctatgtctgttggcaggcaggtttatattgtctttactagatgttttaaggtcatcaaagagttgcttccatatatatacattttcttaatttgtctgtgagcttatgtctttatatttgaagctttaaattctgagttctagatgagtgaccatagtaagaactggggacaaaacccatcccatcctccagctgtgccttttggccatgctgggagaggtgggattatccaggcattttcttcatagctctgttctttgtcttgggctttgcatctggtacatagttagaatgatttactccctagttttttttctactgagaataaggctgtgtaagtctgtttttacattgctacagacaaatacatgaacctgaataatttataaagaaaaaaggtcgaatggtctcatgattcagcaggttgtagagtaagcatgattctggcatctgctcagctttcgaggagccatcagaaaacttacaatcacggagaaagccaatggtagaggaagacatcttatataatgggagctggaggaagagagcaagtgttgcacactggtaaacaaacagataaaaactcactgttgctacaacagcaccaaggagaagggccttaaaatatgagaaaccacgtccatgatccaatcacatccaaccaggctccacctccaactttggagattacaatttgacttgagatttaggtgggggtaaagttccaaaaaagtattattctctccatcatccctcccaaatctcatgtctttctcacatttaataatataagaatggcttcccaacagtctctagagtcttaactcactcagcattaactcagaagtccaaaatagcaagtttcatctgagacaaggcaagttccttttacgtatgagcctgtaaattcaaaagcaagttagttactttcaagacacaatggaagtataggcattgggtaaatactcccattccaaagggaagaaataggctgaaggaaataagatacaggccccatgaaagtctgaaaccttgcagcacagtctttaaaatttaaagctccgaaataatctcctttgaccccatatctcatattcagggcacactgatgtaaggcttaggcttccaaggttctgggcatcacaggaacattccaagagagtcacaaaagaatttgtagtgtggcttttgatgctaaacagtgtattagaccgagtaagtcactgaagagaaaaaagtcagaggagaagatgggtgagggtgacagaaatggaatggtgaaaggaaagttctgacaaaaatgtttatcggctgggcatggtggctcacgcctgtaatcccagcactttgggaggccgaggtgggcagatcacgaggtcaggagtttgagaccagcctgaccaacatggtgaaaccccatctctactaaaaatacaaaaattagccagatgtggtggcacacacctgtaatcccagctactcaggaggctaaagggaggagaatcacttgaacttgggatgtggaggttgcagtgagctgagatcacagcattgcactccagcctgggtgacagagtgagactccatcccaaaaaaaaaacaaaagtttacccaggggctcatctggtaccttgctctgtgactaatatcttacacattttgatttactcttccactttcattttctgatgcgcaaagtgtcacccttctgctgaagatgagaaaagaggctgagggagccaaatgagtggtctagagtcatccagctacttcatagagtttgtgtcttttaccttgacgtttgtgcacagacagaaaagtgagacacagaaggaaggcaaagcaagtttttgttgtgggtgacatttatgaaagttacctgtgttggcagaataatggactcctaaaatgtttgcaccctagctctggaacctgtgcatttacttttcttggtaaaaacatggtgcagcggtgataaaattaaaatcttaagatgtggacgttgttctagattatctgggtgggcccattgtaatcagaagtgtccttgtaagtgacaaagaaaagcaggggggtcagtgtgagaatgatgagcctgtgagactccactggccaatgctgggtgtgagcatgcatcaaaagacaaaattacaactaatgtagttatagattttatttttcatttattatttgaggcagctctcactctacaaatatagtgacagccctccctgagctatacaataacaaaacagtgggttttgtcaagtgggaaccagtaaacaaagccatataaataaataaattggtgaacattagggtacttcaggtctcttttctgtaaaagttaaagcagaggaaacttttattatgctatctcaggtagagtggaatctcctcttttcaacaaaaaacaaaggtctgttctggtatctctttgcttcattaaaatttcagttgtagactgtagcatttagcaggagtggttctattttggagtctctaggctctcacttaggtgagagtgtgaccaaaatttaaagcattggcattcatctcagtaaccatcatattgggcttccatcatttataagtttatgatgtcttcctgatcacacatttctttgagtttttgtcatttcagccaaagagagaccctttggtatttgttgatggctgcacacaaaactttttaaaaacttttgtagaattcaccacaccaaaatatagaattttaaaacctatagaatttatcacaccagagatgctactagtatgactatcaggaggataacaccaaaagtttggagtatgcactttaggcaagatgcaaaccaagtaaaatagaatagatcaaagaatgagccagaagagtctagcaattttaaccaagtagtatgtttggtaacttctgtgattgagtcattattatactcgatgtatttctttatgtgcaacagtcagtgtcagaaactgcacaggctcctccctgttcagctggtagggaacaattttattatgtagcattcgacggctcattaaattaaaacagggagtgagaacaagtgagtctgaaaatgtaactttaaaagggaccactgtacatttgaagaaacaagtgtgttaaagatgctgctaatgtcagccgttgggtggactaaatgatatcttatgtaaaaatttgagggtgacatgatatatctgtcactctgttacgctactctcagaagctacttcatgtgaaattctaatgataccatcatcgtgccacgtgaaagaggcaggcataagcatggacaaattaagagggctaagagcctgattttgatgtggagacttgttctgacaacttgggaaaagcttttgacagtgtgaagttgtcaacttcttatcctggttttaagtttgagtgtctgtagttatggtgtcaaacatattggtgagctctgagtgactcatacctcaggcacgagggttttcccgtgaaatttacattgagctttccacctccaacttatagggcttcaggaacaaagcagattttgttcttactgattcaataagagaaaactggatgggaggaaatagaagaattcagggtctagtccagtctaccggtgaataataaaaactcaaaaacaatgaacagagctgcaatttcatagcaggtatactacactttttattttcaacattatttttctctctataggcatatctatttttaccaaagagaatcccagtaggacaaattcgtttccaaagtaggtttagtcttatcagactttgccgggattctttacataagtgcatcaagagtaacaatggaccacagaggctcttcctaaagtttgcttccctagaagtttttataaggagtctcagattaaacttttacaagcctcttgagatgaggaagccaaatgaaggccatcttcagcctttgcatgcagtacttatgggtccattctatgtatattctcaaatataacatcttagtcaaagccttggtaatataaccaatgttttgaaacgtgtccttttgtaaagagagaagactcttactaaacttgtgcaaataactgtattagcataatcatatgaatactcatgaatagtttcccaatcctgggacagttaggaaaagagcaaaaataaatgggcttcaattattgtttccaaaagtatactttaccaaattgctttagatatagatagcttaaaagaagaaaaattccataaatctggaaaaaatcatttaaagaatcagcaaattttcaaataaaaattataaaaacattatccacattatcatttatttcaatgaaattatatttgttctgcttggtctcagtgggcatatttcatgaaggcatcaacctgtttgttaaagttttggaagtctatagacagtccagtgatataaccttgaactgctcagaaacttgtatgcaagagtacttgtcagtatcttttccataaatcttttgaaatagaagcaattttggactgtagctgattgcagatgctttcaggaagaatcaaaacaactatctgtgaattaccaacatgtaaaatgactattgctaaaactctgataagagtttggtataataaagagagtaactctggccagtacaccagtcatgatgctgacagtggccccaactgagagaccaaaagaactttcttgtcctgaagcagctgtcatggaaaaaaaaaaaaaaaagaagagaaggaataaattataaagacagcaagggttttagccaattattttttgagatagggtctcactctgttgcctaggctggagtgcagtggtgcaatctcagctcactgcaacctgtgcctcccaggctcaagcagtccccccacctcactctcctgagtagctgggactacaggcacacaccaccatgtatgcttaatgtttgtattttttgtagagatgggcttttaccatgttgttgaggcttgttttgaactcctggactcaagttatccacccgccttggcttcccaaagtgcagggattacaggtgtgagccaccgctcctgctggtttcatgctttttataataagaatgaactccttatgtaataataaataaaaagaaattatttgctttggatgtagcaaatgtagattgaccagagtcaggagctaagcctcatattttttttggctttagctcagtgtagagtgcattgaaggtgtcccaaaaataattccatatagtaagccaactttaaaccctgctcacagccagatctgccaagtatgagccaggtaaaattaccaaaaagggtggttctgactgactccttaacaataatgtggcttacaaacaaagactgatatgaaatagtcgatccaacccaaacactttgctcatttcccaaaattttctatacaaacatatacaacttatcacaacataaagaacataatgaaaggtttgccttttattcgtttaaatgaccatatgtttagatctgatgtactgacagcgataattctccattaagcagaaacctaataaaatttgaaaaatagtgattttatctttagatgatactcagatcttctgctacatatgtggaaaatggaattattgctagaaacattgtttaaagattagggtatgaaaggagtattaggaagtcaggaggttctttctttaggaagcagcttatctggattcattcaaagagctttatgcgagtttgaggtctttctgcaaaatgtaaattgctatctgagaaaccatatatagtccaatgatgaaagaatgcaaagccttagaagcaccggagacaattccagtatcttccctaaagttctgacaaaaaggaaaataactatcaaattattcaactcgaatgcttattatgtatgtataagtcagttggcagacgaagagaggagggaaatatgacttctacccctagggaacacatagtcttgtggggccactaggggtggtggtgtgacctgcctggagcagcgctaaatatggacttgtgagtgaagggctatcaaaacctaagtaaactgattgccgttcagagaaggtagagttccattccacagtttgcaagaaggactatttcatggaggaggtcatgttggactagaccttaaaaagttggtagaatttaaaagcaaggatatggaagcaggaagagtgaaagtgagcagaggtacagaagtgaggcaaggctgagcagtgttaattttttaatggtggtattataaaacacacatcaaaatttgccatattattattattattttgtagacagtgtctggctctgttgcccaggctggagtgcagtagctcaatcatggctcactgtagcctccacctcctgggctcaagcaatcctcgtacctcagcctgctgagtagctgggaccacaagcatataccaccatgcccagctaatttttatatttttgggagtgacgagttcttcctatgttgcccaggctggtctcgcactcctggactcaaatgatccacctgccttagctccaaagtgctgggactacaggtatgagccactgcacctgaccccatcttaaaaatttttaagtgcaccgtttagaaatacatttgcattatgcaaccatcagcgccacccatcttcagagagtatttttcatcttgtaacagggaaaattcatatccatgaaacactaactcctcattcttcctcctccccaccccaggtaacaactatttcagtgtctctatgattttgactgctctagggacttctataaatgagatcatacactgtgtatctttttgtgacttagcataatgtcctcaaggttcattcatgttgtaatatatgtgagaatttttttccttttgaaggctgaataatatttcactgtatggatagaccacattttgtttatccattcatctatccatggacaattgggttgccttcactttttggctattgtaaataatgctgctataaacattgaggtaccaaaacctgtttgggtctctgctctcaattattttgggtttatacccaggagtggaatggccaggtcatacagtacctctagttttagttttctgaggaaccgccataatgtttttcacagtggttgcaccattttaattcttatgaatagtgcacaggggttccaattgttccacagtctcattaacacttattattttctggggtttttgctttgtgtttgggagtagccatttaaattggcataaggtataatttcattgtggtttgcattttcatttccttaatgattagtgatattgatcaatattttatatgcttgctggccatttgtacatcttctttggagaaatgggagggacagatccctcccattgaatagattaatgtcctctcctgatggtgaatgaattcttcctctattagttcctgcaagacctggttgttaaaagagcaggccaccgccccggtttctctcttgctcccttgctcatgtaatctctgcacatgttggcttcccctcctcttctgcgatgagtgggagcaggctgtggccatcaccagatgaagatgcccaattttgaactttccagccaccagaatcataagccaaatcatcccttttcctttataaattatccagcctcaggtattctttatagcaacacaaaagggacaaggactttttatatcttgccccactgtcttctagcatttcatgtgtcacataaagaaatcttagcctcctaggttttttttttctgaatatccacagaattctttccataacttcaaataccaggaatttattggggtatttgttaattattcaatataaacacagccttgtaattcttgggctatttctgtctgcagattcaaatttcactgtatttcaggaatttcaccttgaattgtatctttgaaaatttgttttcatgttccattcattttttaacccatgcaaggcatttggtgttaatgatatttgatctcttccctaccacccctcccatccccctctttttctctatctctgtcttccgtcttttactttttgttcttttccatctcacatgctcattttttcttctcaaaaccatcctttgaattccttcagtggtgtctcatctcccttttgctgcttctatcatgacctttgattttagtctctttttgtgtgtctctctctgagattctgaggctctgcctattctgtttttattctcatttgtttctaatttgtttccaagactctgtctactcccttttcattctcatttattactaatttatttctgaggctttacccacccacttttcattcccgtctaacctaatgtattatcagttcttccttaaagccttatattgcttctttaaattctcatttcagagaaacaatattgtctttaattgattccttagaaataactttgttcatggtttttggctgcgttgtggtatataatctttctgtttctcatcttcataaatcatgttctgttcttcttttttcatttcagcatcattttaaaggcccccggctggctccaccctttttaagtagcattgttcctcatctttttggactagaattttgggcaaagttctggtgaaaggggaagaggaatgtgctaaacaaatgggaagattgggtttcaatctgttatctctaggatgtttctcagctggacttggcctgtgggttatctggtccagcatagcaggacatcttccaggctcacaaggaggttgtgcattttacagaacattttaatgtgattattttaccttcacttatcttcaccaggcagctttgggcaaagacggccaggtagcttttatcttattgactcttccttctatcctataccatgattgaaacatgatgtaggcttccaaaaccaggccatgaaccttgatcttaactttctaagcatgggatagacacatttcctttcaatgtgtgccacccatccactttggataactatgagctgggtcaactgtgcctgagtcacacatagaaagacaccttctcttggagttcccaaatacctccatccacttctcatacacttggctgtcttcctgcatctacagtgatccagtgttataggggatctgtagcttcatcaaagataacatttgtttgtttctccttctcttgtttgctttggattggtttcataaaggaaatgagacgaaaatatacttatactacgattttaaaagaaaagataaattccttctttcaaattcattcctttttgtttctttccaatgaatctcatggggtgaggggaggactgaagagaatgtccaatctactcaaatccaaaaagtcacaggtataaggcacagaaaattttaccagtctaatgatggcagttttaatgctatataaggacagactatgcaaaaatgctattaatgaggatgaggagctacaggaacaaacctgatgaggaactgtaattctattagagggatgtatatagccatcatttttttctttaatccaaaacaattagattgcttatgtagacagccacatgctatttgattgaaatgcaccagaggatgcagatatatatatatatccttttaccttaatttccattttattctttctctcccttttttttcatttattattatactttaagttttagggtacatgtgcacattgtgcaggttagttacatatgtatacatgtgccatgctggtgcactgcacccactaactcgtcatctagcattaggtatatctcccagtactatccctcccccctccccccaccccacaacagtccccagagtgtgatgttccccttcctgtgtccatgtgatctcatttttcaattcccacctatgagtgagaataggcagtgtttggttttttgttcttgcgacagtttactgagaatgatgatttccaatttcatccatgtccctgcaaaggacatgaactcatcattttttatggctgcatagtattccatggtgtatatgtgccacattttcttaattcagtctatcattgttggacatttgggttggctccaagtctttgctattgtgaatagtgccacaataaacatacgtgtgcatgtgaatttatagcagcatgatttatagtcctttgggtatatacccagtaatgggatggctgggtcaaatggtatttctagttctagatccctgaggaatcccacactgacttccacaatggttgaactagtttacagtcccaccaacagtgtaaaagtgttcctatttctacacatcctctcctgcacctgttgtttcctgactttttaatgattgccattctaactggtgtgagatggtatctcattgtggttttgatttgcatttctctgatggccaatgatgatgagcattttttcatgtgttttttggctgcataaatgtcttctgttgagaagtgtctgttcatgtcctttgcccactttttgatggggttgttttttttttcttgtaaatttgtttgagttcattgtagattctggatatcagccctttgtcagatgagtaggttgtgaaaattttctcccattttgtaggttgcctgttcactctgatggtagtttcttttgctgtgcagaagctctttagtttaattagatcccatttgtcaattttggcttttgttgccattgcttttggtgttttagacatgaagtccttgcccatgcctatgtcctgaatggtattgcctaggttttcttctagggtttttacagttttaggtctaacgtttaagtctttaatccatcttgaattgatttttgtataaggtgtaaggaagggatccagtttcagctttctacatatggctagccagttttcccagcaccatttattaaatagggaatcctttccccattgcttgtttttctcaggtttgtcaaagatcagatagttgtagatatgcggcattatttctgagggctctgttctgttccattgatctatacctctgttttggtaccagtaccatgctgttttggttactgtagccttgtagtatagtttgaagtcaggtagtgtgatgcctccagctttgttcttttggcttaggattgacttggcgatgtgggctcttttttggttccatatgaactttaaagtagttttttccaattctgtgaagaaagtcattggtagcttgatggggatggcattgaatctgtcaattaccttggacagtatggccattttcatgatattgattcttcctacccatgaccatggaatgttcttccatttgtttgtatcctcttttatttccttgagcagtggcttgtagttctccttgaagaggtccttcacatcccttgtaagttggattcctaggtattttattctctttgaagcaattgtgaatgggagttcactcatgatttggctctctgtttgtctgttgttggtgtataagaatgcttgtgatttttgtacattgattttgtatcctgagactttgctgaagttgcttatcagcttaaggagattttgggctgagacaatggggttttctagatatacaatcattccatctgcaaagagggacaatttgacttcctcttttcctaattgaatgccctttatttccttctcctgcctaattgccctggccagaacttccaacactatgttgaatagtagtggtgagagagtgcatccctgtcttgtgccagttttcaaagggaatgcttccagtttttgcccattcagtatgatattggctgtgggtttgtcatagatagctcttattattttgaaatacatcccatcaatacctaatttattgagagtttttagcatgaagcgttgttgaattttgtcaaaggccttttctgcatctattgagataatcatgtggtttttgtctttggctctgtctatatgctggattacatctattgatttgtgtatattgaaccagccttgcatcccagggatgaagcccacttgatcatggtggataagctttttgatgtgctgctggattctttttgccagtattttattgaggatttttgcatcaatgttcatcaaggatattggtctaaaattctctttttttgttgtgcctctgccaggctttggtatcagaatgatgctggcctcataaaatgagttagggaggattccctctttttctattggttgaataatttcagaaggaatggtaccacttcctccttgtacctctggtagaattcggctgtgaattcatctggtcctggaccctttttggttggtaagctattgattattgccacaatttcagctcctgttattggtctatatagagattcaacttcttcctggtttagtcttggaatagagtatgtgtcgaggaatttatccatttcttctagattttctagtttatttgcatagaggtgtttgtagtattctctgatggtagtttgtatttctgtgggatcggtggtgatatcccctttatcattttttattgtgtctatttgattcttctctctttttttctttattagtcttgctagcggtctatctattttgttgatcctttcaaaaaaccagctcctggattcattaattttttgaagggttttttgtgtctctatttccttcagttctgctctgattttagttatttcttgcctcctgctagcttttgaatgtgtttgctcttgcttttctagttcttttaattgtgatgttagggtgtcaattttggatctttcctgctttctcctgtgggcatttagtgctataaatttccctctacacactgctttgaatgcatcccagagattctggtatgttgtgtctttgttctcgttggtttcaaagaacatctttatttctgccttcattttgttatgtacccagtagtcattcaggagcaggttgttcagtttccatgtagttgagcggttttgagtgagattcttaatcctgagttctagtttgattgcactgtggtctgagagatagtttgttataatttctgttcttttacatttgctgaggagagctttacttccaagtatgttgtcaattttggaataggtgtggtgtggtgctgaaaaaaatgtatattctgttgatttggggtggagagttctgtagatgtctattaggtccacttggtgcagagctgagttcaattcctgggtatccttaactttctgtctcattgatctgtctaatgttgacagtggggtgtaaagtctcccattattaatgtgtggtagtctaagtctctttgtaggtcactcaggacttgctttatgaatctggatgctcctgtattgggtgcatatatatttaggatagttagctgttcttgttgaattgatccctttaccattatgtaatggccttctttgtctcttttgatctttgttggtttaaagtctgttttataagagactaggactgcaacccctgcctttttttgttttccatttgcttggtagatcttcctccatccttttattttgagcctatgtgtgtctctgcacgtgagatgggtttcctgaatacagcacactgatgggtcttgactctttatccaatttaccagtctgtgtcttttaattggagaatttagtccatttacatttaaagttaatattgttatgtgtgaacttgatcctgtcatgatgatgttagctggttatttttctcattagttgatgcagtttcttcctagtctcgatggtctttacattttggcatgattttgcagcggctggtactggttgttcctttccatgtttagcacttccttcaggagctcttttagggcaggtctggtggtgacaaaatctctcagcatttgcttgtctgtaaagtattttatttctccttcacttatgaagcttagtttggctggatatgaaattctgggttgaaaattcttttctttaagaatgttgcatattggcccccactctcttctggcttgtagggtttctgctgagagatctgctgttagtctgatgggcttccctttgagggtaacccaacctttctctctggctgcccttaacattttttccttcttttgaactttggtgaatctgacaattatgtgtcttggagttgctcttctcgaggagtatctttgtggcgttctctgtatttcctgaatctgaacgttggcctgccttgctagattggggaatttctcctggataatatcctgcagagtgttttccaacttggttccattctccccatcactttcaggtacaccaatcagacgtagatttggacttttcacatagtcccatatttcttggaggctttgttcatttctttttattcttttttctctaaacttcccttctcgcttcatttcattcatttcatcttccattgctgataccctttcttccagttgatcgcattggctcctgaggcttctgcattcttcacgtagttctcaagccttggttttcagctccatcagctcctttaagcacttctctgtattggttattctagttatacattcttctaaatttttttcaaagttttcaacttctttgcctgttgaaacttttttcaaagttttcaacttctttgaatgtcctcccgtagctcagagtaatttgatcgtctgaagtcttcttctctcagctcgtcaaagtcgttctctgtccagctttgttccgttgctggtgaggaactacgttcctttggaggaggagaggcgctctgctttttagagtttccagtttttctgttctgttttttccccatctttgtggttttatctatttttggtctttgatgatggtgatgtacagttgggtttttggtgtggatgtcctttctgttagttagttttccttctaacagacaggaccctcagctgcaggtctgttggagtaccctgccacgtgaggtgtcagtgtgcccctgctggggggtgcctcccagttaggctgcttgggggtcaggggtcagggacccacttgaggaggcagtctgcccattctcagatctccagctgcgtactggaagaaccactgctctcttcaaagctgtcagacagggacatttaagtctgcagaggttactgctgtctttttgtttgtctgtgccctgcccccagaggtggagcctacagaggcaggcaggcctccttgagctatggtgggctccacccagttccctcttccaggctgctttgtttacctaagcaagcctgggcaatggagggcgcccctcccccagcctcgctgccgccttgcagtttgatctcagactgctgtgctagcaatcagcgagactctgtgggcataggaccctccgaaccaggtgtgggatataatctcgtggtgcgcccttttttaagcccgtcggaaaagcccagtattcgggtaggagtgacccgattttccaggtgccatctgtcacccctttctttgactaggaaagggaactccctgaccccttgtgcttcctgagtgaggcaatgcctcaccctgattcggctcgtgcacggtgcatgcacccactgtcctgcgcccactgtcttgcactccctagtgagatgaacccggtacctcagatggaaatgcagacatcacccatcttctgtgtcactcacgctgggaactgtagaccagagctgttcctattcggccatcttggctccttccccagttgttttttttttaatctgtaaaaacggggatggtggcacttgggatttttttttttttttttttttgagacggagtctcgctgtgtctcccaggttggagtgcagtggcgcgatctcggctcactgcaagctccgcctcccaggttcatgccattctcctgcctcagcctcccaagtagctgggactacaggcgcccgccaacacgcccggctaattttttgtatttttagtagaaacggggtttcaccgtgttagccaagatggtctcgatctcctgacctagtgatccgcccgtctcggcctcccaaagtgctaggattacaggcatgagccaccgcgcccggcccgcacttgggattttttggtgaggactgtagttacctggaaaggccttaggatagtgcctggtacatagtgagtgctgcatcagtgtgagctattataattatgggaatagacaaaggtgccaccctggccatccagagtggggaggtattttccagtcagggtccaggcaggccagctggagatgaagctgattagtggggaagcttaacttccaggagtggaagaatttaggaggagtaaacagaatgcacaacattctgtaaacattcctttacccaacagtaggaatgctcatagtgggtgtggcttccgtgacaatcattatctcttgggaatttaagaatgtgtcctagagtcaaatggctttgatgtaagccaaacccagaaatgggcttcaggtctgccttacacatagcattcattcatcttgaaaaaggaaagcattcatcttgctaaaggaatcccctcttctggcccaggtcattatttttgtttttgtactgtcctaatttttaaggtgtaaggagaaagaccaaagaataaaataatgaagtacatgtatgaaataacagggtagaattgagactggtacgtgtaagttaagagaaattgtgtataaattttgtgtgaatagaaaaaggatttcttgttgcaaacagacctctctatataaataatacccattgccttcagtggatagcagactgcatcacaagaacattccagcagagtcacgagagaatgggtagtgtggcttctgtaattggcaggttagacagagtaagttactgaagagaaaggagttgaaggagaagatgggtgagggcaagaaaaatgggaaggtgaaaggaaagaactgaaaggaatgtttaccaagggctcatcaggtaccaggctctgtgattaatgtctcacacatgttaatttactcttccactgtcattttctgatgcagtaagagtcagtcttacactgcagatgaggaaagaggctgaaggaggtcaaacgagtggcccagggtcatccagccacttcatagcagagctagtgtgtttcactgtggtttgcgcagacagaaaagtgagacatggaaggaaggcaaaacatttttcttgtcggtgatgtttatgaaagtgacctgtatgaggcagaataatggcctcttaaaaatgtccacatccaggtcgggtgcggtggctcacgcctgtaatcccagcactttgggaggctgagatgggcagaccacgaggtcaggagttcgagaccagcctggccaacatggtgaaaccccgtttctactaaaaatgcaaaaattagctgggtgtggtggcgggcgcctgtaatgccagctacttgggaggctgaggcaggaaagtcatttgaacctgcgaggcggagattgcagtgagcccagattgtcccactgtactccagccggggcaacatgagtgaaactctgtctcaaaaaaaaaaaaaaaatccacatcctaactcttggaacacatttacttggaatgcatttacttttcttggcaaaaacactgttcaaagttgatgaagttgagtattttgagatggaaagcttattctggcttatctgggtggctccctgtatcatcataagggtccttgtgagtgaaagaggaaggcaggagggtcagggtgagaatgatgcagtctgagagactccactggccattgcttcctgtgaacatgtgtgataagacaaaattacaactaatttagttatagatgtaattggcttttatttgtgatttatgatttggggcagctctccctctacagatgcttcagcatcccaagtagctgggactatattgcaggatctggccagcagcctgcaatgcaacggggctctttctttgttcccaggcagattggcaggttgagaaataaaagacacacacaagatagtgaaagctgggtccagaggggtcactgccttctggtcctgcgatgctgccaatgcactggatataccagcatttattattaagtttagtgagagtgggggtaggttagtgagggatttagggtcatttataggctctccgtaagggtcacattccattcccagagctatggacatctgcttttctgggataggaatcttggtaatgtgaaacctccctgactgcatgtccgttcataggctctctgcagggggaagcacatcacgtgctgttggctcattctggcagtccaacctggcatttgtctttacacaatcctgcatgcaactttgtatttacaataatcaggagcatttcatctttcattccgtagcaatagttcaggggttctccctacatctctgcttttctctgatttaaatgaaccatagcaatcatagcttggcactgatcacaattggattgaagaacattttttccaattttacacatgaacaataaaccaacagcacaaattatacacagaacaaaattaacgatagtggatcctcccaaagattttacctattgaatggggttgagattagataacccctcagagatactgtctaaaacttcagcactgggtaaagcagttaagtgtgcttgagaagcttcaaaaatctgttctttcagcttgcttatgtctaaacttaaattatcttcacttccttgtaaatggcatattactgattcccgattgtgaccagactctttatattggaacagagttttacaaaaatcagaagtgttccaatcaggttgcatttgtaatctatgttctaaactcataattctatctcccatccatgtaacagaagcacatcccgtgctgtaggctcattctcgcagcccaacctgtcattgtgtttacacaatcctgcgtgcaattttgtatttacaataatcaagagcatttcatcttttattctgtagcagtagtttctgggggtctccctacaggactgcaggtgcacgccaccatgcctggctaatttttgtatttttagtagagacagggtttcaccatattgatcaggctgatcttgaactcctgaccttgtgatctgcctgccttggcctcccaaagtgctgggattacagatgtgagccactgcacccagcccataaatcacacatttctttgagtttttgtaattccagcacaagagaaaccgtttgatatttgaagaatggctgcacacaaatatttgcacagaaataaaaacatctgtagattccaccacatgagggagaataccagtatgactatcaggaggaaaatatcaagagtttggaatatgcaccttaggcaagatgcaaaccaactacaataggatagatcaaagaagaagccagaagagtctagtcattttaaccaggcagcacatttattgatttttacaactgagtctctataatacccgatgtatttatccatgtgcaacaagaagtgtcagaaactgcacagactccccgctgtccagctggtagagaacaattctattatctagcattgcatgtctatgttaaattaaaacagggagtgagaataggcaagtatagaagtggaagcctaaaaaaaactccatacatttgaggaaaaagttgtgttacagatgcagctaacgtcagcctttgtgtggactaaaggatgtcttgttatgtaaaaatgtgtgggctgggtgcggtggctcatgcctgtaatcccagcactttgggaggctgaggcatgcagatcatctgaggtcaggagttcgagaacagcctgaccaacatggagaaatcctgtctctactgaaaatacaaaattagctgggcatggtggtgcatgcctgtaatcccagctactggggaggctgaagcaggagaatcacttgaacccaggaggtggaggttgctgtgagccaagattgtgccattgcactccagcatgggcaacaagagcgaaactccatcttaaaaaaaaaaaaacgaagtgtggttgacatgatatatctgacactgttaacttactctcagaggctatttctggtgaaatcctaagtacagcattattctgggaagcaaaggagacaggcaaaagcaaagacaaattaagagaggtaagagtctcatcatgactgatagtcttgttctgacatcttgagaaaagctgtccacagtgtaaagtcatcagcttgtcgtggtttgcagtttgagtgtctctaagttatggtgttgaacatttggtgagctcttagtggcccccacctcaaacacgagggttttcccatgaaatttacattgagttgtccacctccaccttatatggcttcaggaacagagccgctcttgttcttaatgatttcattggagaaaactgaattggaagaactaaaagaattcagggtccagtccagtctaccagtggattataaatactcaaagataatgaacagtggttcaatctggtaacaggtgtactacagtttttcttttcagctagtttttctctctatcggagtctctatttttaccaaagataattccaataagatgaatttgcttgcaaaataggttgagtctcaccgaacttgcccagattttttacctaagtgcggcaagagtagcaatggaccatagaggctctttttaaacttctctttgctagaagtttttaataagaatctcagatgaaacttccaaaaacctcttgagactaggaagccaaaccaaggcccacttcagactttgcctgcattccctatgggtttattctatgtatattctcaaatataacatcccagtcaaagccttggtaatataaccaatgttttcaaatgtgtcctgttataaagagagcagattcttacggaacatgtgcaaataactttattaccataaacctatgaatactcatgaatagtttcacaattctggggcattcagatagacagcaaaagcaaatatttcaatttttgtttacaaaagtatactttaccaattgctgaagaaaaaaagttcataaatctggagaataaaacattcaaagaatcagcacattttccaataaaaaattatgaaaacattatccttttgattatttagtccaataacattgagtttttttcttctttgtcttgaatttcatgaaggtatcagcctgttctttttctcagtgtctcagttgttgcagtcatgactgagactctgtcaggtctccatggcagggacctgattgacagaaggcccaggtcagtgcatttcaaattcactacctcctttacacagaaagcttctttcctacaggctcccaggaagggtgtgaaagcaagcctagttctctgaggctctatttaactctaatgggtggctggttggaggattccccatcagccttgcaaatactcttagaactgcattggtacctaaaacttctttctctttctttttcacaggaatcagctctgcatagtgttctgtgggttctcccatactaccttcatgcctgctccacattccctcacaggtgtcttccctgataaattaccttgtatgtctaatcccatcttggatgcatctcagttggtaaaaactaacataccagacttgattctttgcccttagctttttttttctctcccacaagtagtcagtaaccatgtcctagtgttttatgtgttacctctttttccatatatatggaaaaaggtaggtactgttgaggtgcacttcctatgtgccaggccctgtgctcaatactttacctgtatctcatttaagccacacaataaccctgtcacatagacattatttccattttgccgatgaaaagacagaagcttagcatggtgtaaaaactttcctggtgtcatatggctagtgacaggtggatctgagatttgattctaggactatttgacctcaaggctaatgatgatggtagtaatatagcagctgacattggttccgctgtgtgtggcatattgtttcattgactgcattaaacctttaaaacaatggtaagaagaaagtactctcattgcaattttcaggtaaggaatcagaggttcagagaagttgagtcttgtgcaagaaatttataactgtaaactcttacattaaaaaagaagaaagatctcaggtcaacaacctactttaatacttcaggatatgaaagaagaacaaactaaacccaagcacagtgaatgagggaaataataaagattagagtggatatacataaaatggagaatggaaacagaatagaggaaattaatgaaaccaaaagttgattcttcaaaataaaatcaacaaaattgacaaccattaactagattgactaagaaaaaaagagaaaagtttaaaattactcaaatcagaaatgaaaatggactctgagcatggtgggtcatgttttaatcctagcactttgggaggtcacagcagaaggatttcttgagaccaggtgtttggaccagcataggtaacctggggagatgctgtctctacaaaaaaataaaaaaaaattagctgggcatggtgacatgcacctgtagtcctagcatcttgggaggctgaagaaggagaattgcttgagcccaggaggttaaggctgcagtgagccgtaatcacaccactgtattccatcctgggctggcctacagagtgagagcctgtctctctctcttccaaaaaaaaaaaaaaagaaagaaagaaagaaaaatgaagcgattactaccaattctaataaaataatgatgatgaaagtactataaataattgtatgccaataaattggataacctagatgaaatggaccaactcctagaaccacacaaaaatatgagtataactataatcagtaataagattgaatcaataaaagcatttgatgaattcaatattttttcataatgaaaacatcctaagaatggaaggaaaccacctcaacataaaggcaatatgtgaaaaacccaatgctagcatcatactcaatggagaaagactgaaagctttccctgtatgagcagtaacaagacaaggatgcctgcttttgacacttttattcaacgtagtattgaaaggtctagtcagaaaaattaggcaagaattgaaaaaaagacattcaaattggaaggaaggagtaaaattatttctgtttatagataacttgaacttatatgtagaaaatcctaaagattgaacaaacctaattagaattaataaataaattcagtaatgttgcacaatacaaaatcaacattcaaacatctgttgtatttcaatacactaaccatgaacaatctgaagggaaattaagaaaaaaatttcaatttatattaacatcaaaaagaataaaatatttaggaataagtttaatcaaagaggtgaaatgattatacctgaaatctacaaaatattgctgaaagaaatgaaagatgacatcaataaattgaaagacattttgttttcatgaattggaagactcaatattgttaggagaacagtgctacccaaagtgactgcagattcaatacaattcctatcagattctcagtggcatttttgcagaaaaagaaaaatctgtcctaaaatttatattgtatctcatgactctaaatagacacacagctttgaagaggaagaatgaagctggaggactcacacttcctgatttcagcatttacaatggggaagggacagtgttctcaccaaaggatattgggaaagctggatatccaagggcaagaagattggaacctttacctaacaccatgtacaaaaattaacccacaatagatcaaagatctaaatgtaagagaaaaactacacaactcttagaagaaaagcttcatgatactggatttcccaatgatttcttggttgtaacaacaaaagcataggcaacaaataaaatggataaatcggacttcacaaaaatcaaagcttttatatgtcgaagaacattatcaagaaagtaaaaaggcaacccacgaaatgataaaaatatttgcaaattatatgtgtgataagaaattcatttccagaatacatgaaaagctacaagtcaacaacaacaaacatccaaaaacccaattaaaaaatgaacaaaggattaaaatagagttttatccaagggagatatacaaatatccaataagcccatgcaaagttcctcagcatcacgaatacctggagatatgcaaatcaaacccacaatgctacaccacctcacacaatttaggatggctttgataaacaacaacaatgacaacaacacaaaacaacaggtgtttgcaagtagatggaaaaattggagctctagtgcattgctgatgggaatgggaaatgttatagccactgtaaaaagtggtgtggctgtttctcaaaaaattaaacaataaattaccatttgatccagcaattccacttctggacatactccccatagaattgaaagaaatttgaacaaatatttgtacactgatgttcagagaagcattactcacactagcgaaaaaatggaaacaactgaaaagtccattgaaagataagtgggtaggcaaatgaggtgtatctatacattgaaatgttattcaaccttaacaaggaataaaattccaatacatcatgcaaaatggatgaaccttgaagatattatgctaactgaaataaaccagacacaaaaggataattattatgtaattccatttataaaagatagttagaatagccagttacatagagacaaagtagaatgatgggtgctaagggttaggggaagaaggagtgagagttactgtttattgggtacagaggtttaatatggtaagaggaaaaagttctggaaatggatagtgtgatggttacacaacactaaattgcacacatagaaatagttaatggtaagtcttatattagatatatataaagtgtctggtagtcttaccctctctataattacacactttttggcactgcccctttcctgccatgaataaccccaacggtgaatctccctattcctccagctctgcatcagtcactgtcctccgtgctgtgtcccacgtgctgtgcccaaagcctcatacagctggtgacttcagagccaggacgcagctcaggagtctgccctgaggctccctctcttcttatttccctgcagcctggcccgggggaggcttggcttcaactggcagctcaatttagccaaattcaggacaggccaccagggccctttctacacacacgctagtcccaccccaggttgagtgaggcagggccagtcaccagaggagcccggagcagagcaggaagcagagtctgagctgctcctccctcacccaaggggcttcctcctctcatctgggggaaaagtgtgagcttgtttcaaagcctcagctgtcccttgtagctcatggaataggtacaagaaaaaaaagacgtggcagaaggggatgtgtcggtgacagcgagaagcaacttgatcttgaggactctccttcttgtccctctctgaagcctcttctaccacatagggctcagggctgataaagccccctccctacctttttcaggccagacacaaggtcagccataagaaaacagaaaaacaaggagaagagagtctgtagagacaaattgggagggttcaggaggagaatttgggatttgcttgtgcccatgggacacaggctgggaataaaaatgttttcctgactcttctctgaaagccagatagactccacataaaaccctactgccaaggatgctgggatccacttaccagagactttgactgtcatggatttggagatttccttgccagtggctgagttatgaacagagcaagcatagagcccgctatgatttctagtaatttgggggataaagagcttttgtcctgattgctgaaacttcccattaattgtccaaaaatactctgccggtgggttagattccgtgaagcaggacaagtcgaggttttctcctgaacggtaataggtgaatgaagggtaaattctggggaggtctggaccatctggaggaaagagaataaagccacacgtgatgtcattcgagggaaggggatgttcctggtctcttaaagggacacagtgaccctctgagccaagacacaccctcaagtcccagccaaagtccctctatgttcactgagctgaagcctgaggtattcacctgtttctcccatcacaagctgtgggccccaagtctcccatgacaagagcatccactccccttatattcttggttaaggctgtgcctacccaggttttcccagggcagggagtcatggccacctcggatgtctagaagtaaaggtgtctatacttggaccggagagagactgagaggcctggcatctggtcgtttggacttaagctggtgtcctggcccacagaggaacaaaagatactcacagaggacatttaggatgactgggttactgcggaggccaccatatcggtcccgtatttcacattgatagggtcctgtttcatttctcgtgacactgggtagaatgagtatcctgttttcaatgggtcgctttaccccgggactgacggggaggctctgaccgtttagccaccaaatgtaggtgtagttctcactcttaggttcacaggtgaaggctaagacatccttattctccctggggtttaagttgttgatggtgatgtaggggatgggcagcttcgctgtgtggataacagagagaagattgtcctgtgtggcacctttgattcctccacaggcatacttcaatcagagttggcatctcccacctctcagcccacccgagtccttgaaagccaatagctggtgcgtgtgtcacaagacagatgcatgatgatctaagggctcaaagactgtgaggccgcctgctctgtcttagggaagcacagactttctcaagtgtcaattgagcagcagtgttgggtcatggacagacacatcagtgggagtcacagcccctggtacccctcccagtccctccctaatcagttgactggctggctcaccttgggttccttacctggaatgtgcaactgctgggccccttccaaattccatcctactttgcccccctatatgtgatttctctgcagcttccatttctaaggatgttctagagatgagtaataatgggacttcccattgtcctgagaccctgaagatacttagcagcctggcctgggactggatgtttcagcagaaataacacagaggagaccagagtcaagcctggaggtcagttcagtcatcaggcagtggaggctcaaggtggggcagttttttgcaggtgtttcatgatgacttacttgaaccagtgacctctaaacatagagcagagtgcaaggaatgatctagaaagagtgaaggcgacaggcaagagctggtggctttggagcagaaccatgttctctgtcctgggttctttaagtttcctctccttctgcagagggcagaggaggaccatgtggatctttccagaaatacatgtggacatttgcaaatgcagaactgactggtggaaagtgtgggaatgaactgctggaaatctggtcctcatggaccatgtgtgtttgatggatatgagacaaacttggagagaagttttgcaaatattttctttcattggacattctactctctgatcccctgggttcgactactctagggacctcatgtaagtggattccagagtgaatatgagaagagactgctggttgccaggagctgggagtggggagaatcagaaattgttcatgggtgtgcagtttcagttatgcaaggtggggaggttctagagatctgctgtagagcttgatgcctatagttcacacagattgagtatttcttatgcataagtcttaggacaaaaagtgttttggatttctgacatttttttattctgaaatatttgtcatatacttactggtttagcatcccaaatctgaaagattcaaaatctaaaatgcttcagtgagcatttcttttcagcatcagattagtaggcaaaagtgggaggtgataagccaaagatattcttgccctttttttttctctcaccacttttctagcttgatgattagtttttggtcaattccatactggccatgctgcactcatatattttttaaagctttgggatgtgagaaaggctgattgctattttctttgtcatcagaactttccaccttttctggttgcatctttttctcagtgtttgtgttgtggcagtcattaataagatcctgtcaggtcagatttaggacagagttttctaattctgcaaaaaatgttactgggattctggtaggggttgcattgaatctgcaactcaattgggtagtattgtctttctaacaatattgattcttccaatccatgaaaatgaaatgtctttccatatattgatatcatctttaatttctttcagcaatgttttgtagttttcagggtataatcatttgacctttttggttaaacttattccaaaatattttattccttttgatgttaatgtgaattgaaatcctttccttaacttcctttcagattgttcattgttagtgtatagtctaaagaatgatctagaaagagtgaagggacaggcaaaagctggtggttttggagcagaaacatattccctatccagggttttttattttccctctccctttgcagagggcaggtggctgttccctgacagctagatagacttcactggaaaacatagtgccagtgctccagggacccacttaccagggactatgatcctcttgattatgagatttgttccaccagtggctgagttatggatgaaacagacatagaccctctatatgttttagtgatttgggggataaagaacacttgtgctgagtgctggaacttcccatcaatcagccaagaatgctctgccagtgggtgagagtctgtgaggcaggagagattggggaattcccctgtatggtaatagatgtatgaggaagaaatggtgggtgcatccaggccatgtggagcaaagagaataatgtcacaagcgatattgtcagagggaagggaaaatcctggtctgtggaagggccacagtgaccctgtgagccaagtcgcaacactgaagtcccagccaaatccctgctgtgttcactgatctggagcctgagacattcacctgtttctcccatcacaagctgtggacccagagtctcccatgacacagcagcctcttttctcccattgttgatcaagcctaggcctactctggtttgcttggggcagaaagtcatggccagctttgatgtctaggggtaaaggtctctgtacttggacctgagagggactgagaggcctggcctctggccatgtgtatttgggatggcagcctggctcacagaggaacagaagatactcacggaggagattcagggtgactgggtcactgcgactggcactcactgggttccgtatttcacattcatagggtcctgcaatatactttgtgacaccaaatagatagagggtcctgttggttttggacagctgcaacctgtgagtcacagggaggctctgaccattcatccaccataggtagcttgcgtccagagtctcaggatcacagattaagcgcacagcctccatggcctccctggggtttaagttgctgctggagatgtagggcttgggagtctccactgtgcagaaaacagagagaagattgccctgtgtggcacctttgattcctccaaaggcatttttcagtcagagttggcatttcccacctctcagcccaacccagtccttaaaagcccatggcaggtgtgtgtgttacaagacagatgcatggcaatctgagagctcagagattgtgaggctgcctgctttatgtgggagaagcacagactttcttaagtgtgaattgagcagcagcattgggtcatggaaagacacaggaccagcagtcacagcccctgatgcctctttgagtccctccgtctccaactgcctgactggcccaacttgtggtcctcacttggagcatgcagtgctggaatcctcttagtttcagtcttactttgccccctgaggtatgttttctctgcagcttcccttgccaaggacatcctagagatgggtgatggaacttcccattgtccttaaaccctttgggtattggaaagcctggtctgggactgggtacttcagcagaaataacacaggggagaccagagtcaagccgggaggtcagttaagacatcaggcagtggagccacaaggtggggcagtttgcagttttcccaggtgtctcatagtgactgacttgagccagtgacctctaacgatagagcagagtccaaggaatgacctacaaagagtgaaggggccaggcagtagctgatagctttcgaccaagaccatgttccctgttctgggtccatgatgctcccttccccctgtagagggcaggtgaggaccatgtggatctttctagaaatacatgtggatgtttgcaaatgcagaactgactggtggaaagggtgaacatgaacagatgatggaagtctggccctcaaggaccatatgcgtttggtggatattagaccaatatttgggaagaagtcttgcagatactttctctcattggacattctactgtctgatctgagtttgactactctatgtacctcctatcagtggattccagagtgaatcagaaagtagaatagtagtttgcaggagctgggatcaggggaatagggtgttgttccgtgggtgtgcagttccagttatgcaggatgaggaggttctagagatctcctgtacagcttcatgcctatagttcatacagataaagtgctccttattcagaaagcttaaaacaaagtgttttggatttctaattttttttattttggaatatttgcagtacatgtactggtttagcatcccaaatctgaaaaatttaaaatccacaatgcgccagtgagcacttctttttagcatcacatcagtggtcagaagtgttgacttttgagcatttcagattgtggatttctggatttgggatgctcaatttgttatactgtaattttcccataaaaagttgtcaggagtttagacctcatgttgtgttctgactctagtaacaaaaaaaaaaaaaaatttggaggaaacattaaaatgttttcataagtggaaacttttactgatggtccaaacatctaagatcaattgctggtagtagtatttctcttgagaccaaaataaggtttaggtgtgccgtgaattccagcaggatcacattatgctcaaagaaagatgccaaaggtgattggaaattagcagctccttaagtagagagagtcccgttaaaaggaccgaactggtcagtgcatcaattacataaagggaggaaggatgccaaattaaaagaagtgatgtgtgttatgttagtaaatatagaaagaactccctgcttctaatttctgtgcagaattaggaaaaatggggaggactgcaaaacaggtaggtgaaatgctttcttcattttctcttaagctcaggaaacaccactaaaatttaagtctgtgtgaatcaggaagattctaagtgagatgccaatggctcgtgtgtctccccacatgcagaactccaacttatgaaaatggcatcatcatgaggaaatagttgtatgagacacaggcagtaaaaccattagatatcacccacctggccacctccaactggtccccaaaaaccaccagtattcccattatgtgtatgttacagcctttgtagttgtcccacaactacaaaatttaaaaattgctattgtcaaaacaaaatattaaatatgaagttgaatatgttgttccactttttcttccccactttttttgaactttcctttttcagttttggaagtttctattgacacatcctcaagctagggattctttcctcagctgtgtgcagtctaccagtaagcatcaaaagcattcttcatttctctgacagcattttttttttctgagacagagtctcgctctgtcaccctgactggagtgcagtggcatgatctcagctcactgcaagctccgccttctgggttcacaccattctcctgcctaggcctcccaagtaggtgggactacaggcgcccaccaccacgcccggctaattttttgtatttttaatagagacagggtttcaccctgttagccaggattgtctccatctcctgaccttgtgcccgcctcggcctcccaaagtgctgggattataggcttgagccactgagcccagccatctctgagggattttaatgagttgttgacttttgagattgttcagctttttacttagtgttagaactgagtgacaaattccaagcttgttatatgcctgacaggaagccagaagtctctaggaagtgaccagagaatgtgagctccatagcaggttgaggatggagtcacaaatgaaatgggtgaaatgagtccatgtgctttggggactgcaggcctctccagcctctgacaccctggttagtcagggcagagattacacagtgacaggaaactagcatggctgactccatctggcatctagtctcaggctggctgtcctcactcattcctggacataggtcaggctaaccttgggaggaatttattttatggtttaactttgaagcaagaatgataatagttcctccataaaactaacacccttactttgcccagggactgcttttgtcaaactagtgaaagaccatgagattaagattataggagggaactgaattctgctaaaatgttgtcacagtttctataatccctgactgctccgatgtcatttggcaagagtttacaaaatttgtaactaattgctcctatagataacatcactattgtagaacgtgagattggtcttttgagatgtttctcattcttttgcattctggcaaccggctgacctcatccatacctatgactaatggctcagtcagtcatgtggcccctacctggaggcagattcaagcacaaacaaatcatttccctccggccgcatgattccatcaccaaacaatcagcagtactcattttttagtcctgtgcccctgaaacgatccttgaaaatctctaacccctgatccactggggaggctgatttgagtaataataaacatccgtcctcctgtttggcagacttggagtcattaaaatctttctccgactacagaccaccatttcaataattttttttgtgtgtgtgtgcaggaggccagaagaacttgtctggcaattatgagtggatggaggaactgcctatccctgtcccatgttcttgtccacaggtcagactgacaaagggaaagagccatggatgggaatacagtggaatatttctcttagtgacctggggacattggctggagatgaagccaggcaggagtggcaactccaggtgatttctgtgcctttcctatttcctgggaggtgggccaggccacagtgttagtaggaagggaaccgaacagccagcctagttagagggaatgtctggggaaggcctaggggtgggggaagaagctgtgcaggacagggcttgccagtcagaatgaagtgggaggaagatgagggacacagagaagcagagagaggcagagacaccatggcagtgagcagtgagggagacactgacttcagagaccccagggcccaggtgcccccagttccacagtccaggaccaaggagccctgagaaccctccggtggccaaagagcttcagagttacatgaggtggggtggctttaggggcaagaggtagtggggggatgaaacgtgggtgtcagcctctgaaggacaagggacaggtgtggctagaacctcctaggattctgcatgcaaattcagtctctaaagaggttttggatcattcatttcttcattcaagttcttcattcattatgtgagagctcctgagtgtgtgtctctcgctgggcctgtgctggtgtagggtgtgagtggggaaagaaaacaaggtcctctccttgatcctctcatgacagtgacatggacactttgggaaacacaggatttcacgttcagtgatgggggttaagatctgagggggaggcctggacatattttttgcactgactctgatggttgaggcaggtgatttagttctggaatacagactaatcagctgaccatttgctctcactcctctgaggtttggatgcctaagaagagaggatttgagccaataaatgactatggggtccttggaacccagtaagccctcacttctggtggaggagaggataggcctgtggctgcagacagacctcatgtgaccctgatctcccctttgtgtttgtgtgactctggttcagtgactgcaccttcctgtgcctcagttttctctcaatcaaataaactaaatggcaaatggactgtggcttttcatgctatctgtgaataaatgttaaatgattcacagtcacctgacctaatgcttggcacagtggaggtttcacacaagcagcatttattattaatttgcttccatgagaaagcaccttatgtcagatccctgtggacaagctgctaccaggtacatcttctcccttctgtttctgcttctggggacattagactttctatggactgtcctaagcctcccaaggcagttggctgatgtcctacaaagcttgtctttctgtcctctccactctgagtgtcagctgaaaaagctctgtccttgcccagatgagactctgagggctgagccctggctggtgaacagctccaggagacacagtcctcagacagctggtaaattcttggtcccagtaaggcctgcccaagaagccacaacccagcactggcacaggctcctcagcttaactggagcaaggatttagggacaggggtctggggttgaggcttctagggctgagcttctctgagagtatctcaggggtcccctcaagccaagccctactcagttctccagggtctttctcagggtcaaatttatgaagagggcatgatgtgcttggctgagactgatctcctcctgctgagtccccccatcagactgtccttcctctgcagcgagtgtctgcagggtctggatgcgggaaaggaattctgatctgttgaaatttgtctcctctgtgtgtgtcctgcactaaatgcccaaaccccagcatgggacataatgcagagagtgacacaggcagagtccaggcctgacaatcctgtgtgtgtgaagtagaaatgaccccttccccccaacacccagggatcatgtggaatcactcacagtataaggtgaaggtgaaatgtcgaatttcttctctagtctcatcacctcgctttatgatgtgtaaggtgtaggttcctgcatccttccgggtgacattctggatcagcagggatgcgttggaatatactgtttctcttccactgtatgcaggcccatatataattattttaccatcaactatatacgatataatgtaatggtagaggtccgtcatttcccctttgtaccagaagtagccaggaagattctggggcaaattgtggacaagtagaagaacatccttcccctcagaaactttgggtggctgggcttcaatcgtgacttcggcagtggtgggcgggttccagaagtttaaaagtgatgctaggagggggagacagcatcagttaatattgagacctatgtattgtggtgaaaagatggggccctgggtcctgagaaggtctcttccatcctcagccttgaagatacacacacgcacacatacaaacaaacacacacaaaaaacgggcatgtgtgtttgtgtatgtgtatgtgtgtgtgtcctactgtcctactaggtcaaggtcagcagcatgacccccattccttcaacacttctgaccttggcatttttctgtttggaatcctcttccccaggggtccacacggccccctccacactgccctcaggtcctgctcacatcagggcatccttagacttctttcctgacacctccttcagagaccctgggtcttccctttctgacctttccctgctctgctccctccagggttcttgtcaacacctgatctcacattctacatctcttcgcatgtctgtcttcctccccatgacagcgtgagctccgtgaggacagggacttttgtgatcctggttgcaccccagtgcctgggacaggctgcagactcctgtagatgtgagagttctcagggccctccatgccctgggtgtttttttttcccccaattgttgaggttttttgctgaggatagtgtttcatgtcctgcttatatttttatttgaagtgtcatctgatatagttattattatcatttttcaaaatgtggtggccccggatgattaatcaggaaaacagaacacttaagattttcctacctcttaccaattccggttcaatgtgactttcctcttttgacccctgtccctctctggtgtattttcccctatccaggctgcaacagagccttctttcctttttttcttttttttttgagacggagtctcgtactgtcgcccaggctggcgtgcagtggcggtatctcggctagctgcaacttctgcctcccgggttcacatgattctcccacctcagcctcccgagtagctaggattacaggagtacaccaccatacctggttaattttttatatttttaggagagactgggcttcactgcattggccggactgatcttgaactcctgatctcgtgatccacccacctcagcctccctaagagctggcttcttttattttacaaccccatcctctccaggagaccccatccagtcactccgcttcctccccctgtcctctcccaggaagttctctcctcacctgtgagcaggagccccttccaggtgatgcgctgtgtgcaggaaggggctgggaggggccccatggtctctgctgcctgtgtgttctcctctgtggagatgagcctgggatccagaagctgtctgagcacggctgtcagctgtgctgtccttcctccttctgtgctgagcctcttcccggggcaggagcacttctcaagctcatgggcggggtcagtcccaggacacctctctgtccccttctctctcagtcctgcctccttgtccctccttctgtttttccttttgtctgtgtttcaggtccctgggagttgtggaggcctctgcctttttcagcagtgattctttcaccaaacctcaacacacactttgtgcagacacacacacacacacacacacacacacacacacacagaagagacacacacagacccacacagtcaggcacataccctgcaggttgggcaagcacagtcctgggcctcagcctcctgctgtccccatggctctgggttggggtgcacattcatgccttttaccctctttcatccccatctggctctccccttcagtgcaggaggctggagatgcaccaggtccctgtcacagtgacaccccattgtgctgtgggtgagctgtgtgttgcctggtgagagggacccttcctttctctaatcgtgtcaagcttgactgcagcttccaaggatggactttcaggacctgggtgtcccagaggaaactgtccttcctggaggtgtgcagggtgaatctctcatgcctcttaggaggagaggcctgtgctggttgctcagtgggggctgtgagtcccatagtcaaagggacagttctctgtcagtctatggctccctggggtctggcggctgagctggagctcagggtttctcatgttctccctgaccatctttgatgtcctctcttctctgcccagctgattgtcctgtggtcaccacaccttccccgtggtggtgcaggaggaagtggggagttacccaggaaccccgcgggacatggctcattgagacgcaggagggggagcctgggacagagcaggggttcagagctggagagattcatcccgacttactccgtggccatgatgggctcagccctccatgtgctgacacacccaggggtctgtcctgagggttttgacctggccaagctgctgtctgtagaggaggaacaggcagtgaccagagaggctctctggagggacgttgctcacacctgagagggcgggtgggggtgagttgtgttctgggagcaaagagcaataacaccgcccttctccacgcaagtacacaggagaggtctgtcttcccaagggacagctgggggtaggtggccacatcccggatggtacctgtgaatgaccatcacacgctctctgagccccctggggtgcagggggcaggcaggtgacagggtgcctggctgattcccggggaggctgtgggccctcaggcagccgctgttctgtgtcggcgctaggcttggcctgggaagccccagagaacaggacagatggagcaggggcaggcatttagggagcagtgacagaaagagttgatgaggatggagagagttcacgaggggaaagcgcccagtgtggcgtcgcgtgcaccagcgctgccctgggagatgcctttagctgggcccagggaaggagcaggtgtgtggggcaggagctccctgcagagggagtggtgttaggttggcggccgccaggtcagggaggaactgacagagtccgtgtggggagcatggagggtgctgaggacttgggccgaagtgaccctggtgagggtggaccctgctgggctgtgggttccgctgagggaggttggcatcccctgggaaggctccaggctgggagggactctgtcgccctctggtggacagggagggaagtgtgaacggcagcaatcccaggccaggctgcatgttttattccacttcacacgaggtcacacatatgttatgttacagctccttcaccttccagccccgtgagtcccagtctctgtggctctacgttcactgttatccctctttcacaatcagatgtcccaaacgcagatttttgtcaccttctgtgagtttgtgtttgtgtgcagtaggcaacactgtgaataccctgggggcagtgatgcctggggctgagcactgcacatgggtttgagagcagaagagggagcagcagggtgggaagatcaacgtcaggggggcaaggacaagtcattttcattttctcactcccagggaccagaacccaggattctgactccagggcacagtaccacaccctgctggtgtccctggatgtcatgatgctcatagtgtcatgttgccttggcattcattttttaaggtgtaagtttatttgcctcaaatcagaggcagggcttggtcaccatggtagttttcaatactgtgtctggttcaagtggctccagttggtgtccagagataaaatcttagaggcatctctcctgcttggtgtgctgggctcccctctctcaagctgctttctttaaactgataattctgacattcgccctcacatttaaagtgactacctctcagtcacagcgtgagctcctggtcccagtgtttgctgcttgctttgaacacatccattaaagctccctgctggaaacctgtcagataacaccctggacttaataaagccattcgcttacaggtctcttctctcctccctgcatggggtcactgaccactgtgtctgtggtctccaggtgtgccgagtgctccctagtgtctggaagtagtaaaaatacttacattttcacgttgtggttgtattgctgttgcctcacatgccatccagggcctgacattgaggctgccctatgggacctgtgctggttgagcccttgctggagctcttgttttggggcctttgattctcctggggacaggagcttccagctaatttgattgaaatactgatgtgtttcattgacacactgggtcagatgatgtattcatgggcttcagctgccataacaaacaccttagcttgggtgaacgatataatagaaatctatttttcacagttctgtgaataatgtgctatttcaaccactttaaaatgcacaatcaagtgaaattaaccacatacacagtgttaaattaccatcaccactattttccctagaaaatttttatcattttaaactgaaactttgtatcttttaaacaatacctccttgtatgttccaccctagactttgatcatctctactctgtctctatgaatttgcctattcttgatgtctaatataaatggaattatacacttacgttaatttgtttctgacatatttcacttagcataatatttccaaagtccatgcatgttccagtgggtatcagagcttcattcctctttatggcagattaacattctgttgtatgtgtcaccatatttatttattgatgtgttgaggagcacttggattgttttcatattttatattttgtgaataatgctgcaatcaacattcccatgcaagtacctgtttgagtccctggatttaattctttgggtatatacctaggaatggaagttgtttcaaatgagaattctatgattagctttttgaggaaaagcaaaactgtttctcctttttatattctcaccagcaatgtatgaagattccaaattctacataatactggtacttgttatttaacattttaaaagaatggtagccagttttgtaggtgagttgtcgtgtctcattgatgctttgactttgtattttcctaacgactaatgatgttgcgtatcttctcatgtccttcttgactatttgtatatcttccttgaagaaatgtctatttgagtcttttgcccatttataaattggatggtttgtccttttgttattgagttgtagctagttctttatattatctggacatgaaaactgcctatatgtggtttgcaaatattttctctcattctgtatctattaattattttcttgataatttcctttgatgtacaaaaggctcacatcttgataaagcccaatgtatatttttttcttatttctcatgcttttgtatcatatctaagaatccattgcacatttgaggtcatcaatatttacatctatgtctattttaagatgtttttatggttatagatcttatatttaactcactgatcaattttttagagaattgtttgatatggtgggaggtagagttatctaaattcactgttttgcatgtggttatctagttgtttctgcactatcattagaaaggagaattgttcctccattaaattgtcttgacaccctcttcaaagagtaattgaccataagtgtgagggtttatttctagactctcaattctatcccatttgtctttatgtccattcttttgccagcagcttctgttttaataattgtactcctttgtgagatttcaaataagaaagttcaagtcctacaatttcttttggcaagattgttttggctattctggggtccttttttgaaaggtggggaagccaatgtttcacaattgggaaagccttttctgtcttcttcagggggaaatttgggagaatcttttaagaaacttaatctaagtaggtaaactgtcaccactttatttgctgaagtgctatgttaaagtgtgcattgcctcttgtggaagaattgtgagaccctggaagcacttgcccatgtggtgagagacagtgaattccacgatgaggggcagagaggacattgttttgtgatacaatgttgttgggggagttgtatacatctcaacttctttatgtctctgtacagtgggtgtagggaccagccccacagagtcggtgggcttttctccccatgtgcagagatgagagattgtagaaacaaagacacaagacaaagagataaaagaaaagacaactgggttggggggacctctaccaccaagatgtggagaccagttgtggccccgaatgccaggctgtgctgatatttattggatactagacaaaggggcaggataaggagtgtgagccatctccaattgataggtaaggccacatgtgtcacatgtccactgtacagagggccctttcctgcctggaagctgaggcagagagagagaggagaaagagagagagagcttacaccattatttctgcttattacagacttttagtacattcgctaatttcctactgctaactaaacggcagagccacgtgtacaggatggaacatgaaggcggactaggagtgtgaccactgaagcacagcatcacagggagacagttaggcatctgaataactgcgggtcgacctgactaatgtcaagccctccacaagaggtggaggagcagagtcttctctaaactcccccggggaaagggagactccctttcccagtctgctaagtagtgggtgtttttccttgacactgaggctaccactacatcatggttcgcctggaaaccggcatcttcccagaccctggcgttaccactagaccaaggagacctctagtggccctatctgggcataacagaaggctcgcactcttgtcttctggtcacttctcactatgtctcctcagctcctatctctgtatggcctggcttttcctaggttatgattatagaccaaagattattataatattggaataaagagtaattgctaccaattaatgattaatgatattcatatataatcatatctaagatctatatctggtataactattcttcttttatattttattgtactggaaaggctcgtgcactcagtctcttgcctcggcaactgggtgtcctgccgcccacaagtgggcatctccattgcacacagtaggttttgaaatccttgtttatcctctggggtctgggtcttggcttacctgttagctgcagctgaaagaggtgtctgctaagtcaatgacacctgtggggagaagaagggttcagcagagtgaaagtagctggggctcagagaagccaggaaagtctgactcttagaaactgtgggtcagcagatgggtgtcctcagggataaatgggccatgccggtagccactgcagtggattggaagaaggtaagggatgctgggtgtcccatgttctctgtcagctctgcagctgaagatttgggccctgggatggtacggccctgcagcaggggatgggtatacaggaatggctgcatatcgggaccaagtccatgtcatcttcttaggcattgttactgcagatggaggattctgttcagagacctggcctggacacatgggagggctcaccccattcttttaaaattattttaagagaacagtattagcaaatgtggtacatgttttattctgctagaatcagtattactgtcacgttttacaatgtatctcttaggaaatggtgagagccatccacacaatgtgcatttaaaggagactctactataatttcagctttcctactctttatagaaaccatcttctctgcaaacacacaggcaatatctctgtgttcatttctattgggagccctgtatgcaaggtggagagagccacatttccccctgagatgttacataaaagtttgaggttgagatgacatatctgacactctgttattaccctcagaagctactacatgtgaaattctaatgactgcattatcctgccaagtgaaaaaggtaggcatcagcaaggacagttaagaggggtgagagcctcatcatgatggggagtcttgttctgacatcttgggaaaaactgtccacagtgtgaagtcatcaacttgtcctggtttacagtttgagtggctgttgttatggcgtcgaacattttggtgagttctgagtggctcacacgtcaggtacaagggttttcccatgaaatttacattgagttgtccaactccagcttatagggcttctggaacagagtgggtcttgctcttagtgattccatgggagaaaatggaattggaggaactagtagaattcagggtaatgtccagtctacaggtggataataaaaacacagaaacaatgaacagagctgcaatctcataaccggtgtactacagtttttattttccacataatttttctctctatgggcatctctagttttaccaatgataatttcagtagaataagtttgtttgcaaaataggttgagttacttcaaacatggtctgattctttacataagtgcagcaagagtagcaatggaccatgtaggctctcttttaaaattttctttgctctaagtttttataaggaatctcagattaaacttttacaaacctcttgagaacaggaagccaaaccaaggttgacttcagactttgcctgcagttcatattggttcattctatctatattcttgaatataacatcccagtcaaagccttggtaataaaaccaatgatttgaaatgtgtcgtgttaaaaagagagcagactgttactgtacttgtgcaaatatctgtattaccataaacatatcaattctcatgaatagttgcccaattctggggcagtcaggtagagagcaaaagtaaatgtttcaataattgttcccagaagtatagtttattgaactgctataagctatagatagattaaaagaaaaaaattccataaatctagaaaacaaaccatttaaagaatcagcaaattttcaaataaaaatcataaaaacattatcctcattattatcaattatttcaatgaaatcaatatttttcctgcttggtacactgagaattttatgaagatatcagcctgtttcttaaagttttggaagttcttagacagtccggtggtataatgtgaaatttatcagaaacttgtattaaagagttcttgtcagcatcgtttccataaatctccttgaaaaggaagcatttttggactgtagctgattggaaatgctttgaggaagactaaaaacaacgtctgtgaatgacaaagattttaaatgactatggctaaaactctgatgagaattcattatgataacacagctcacataaaaggttcattacttctgtggtatatgacattatggctgataacatatttaatttctaggaatctcatacaatttctggaacaatcatatcagtaacatatccataaatataacatagcaaaggtttagcatcctttaccacttatgatttgaaaatgcttttcatataattttacatatcaaataaagtggcttttccatgtagcttgtgtttctcaacaggattactgagttcttggtggaggccattaatgaatagggccaagaaagtataggcatatgtatgttgaaaaatatccctagataattctaatactcccagctaataagcattaattgaggtctaagttttacctattagaacagctgttctctattctggttacacattagtagcacctgggaagacttaaaaattaccaatgcctgtgtctcactttagaccattaaattggatcctatgggtggggcttgggcatccatttaaaaaaacgttttccagtggttccaatgtgtagctgtatttcccatcagatttctctgatttcttgtggcattcacgtttttctattttggtattataattattttttgggtcttatcatctatcttaggctttatgttccttggggtagaaaccttaccttcttcatttctgtatctttcatgaacatatgggttggtcatcaggaaaatgttctcaatcacgtgtaggttgtgttctgagtctcaggtttacatattaatgctagagtcattgttctccaggaggtcagaggttgcttgtgatgaagggtatgggtaatcccatactgcagatggtagatgggagatcaccctgtttttagccatagcattggaactaagcattctatgtgtatatcaggtggaggggaagggatgtgtagaaagacagatttaattagaatggaggaattatactagggaatagagggaatggaagcaataaaaattagtaaagagaagaaatgtgaacttatcaaataggcaagagtagatccctgaagatttttgaataggtgagttaactagaatttaggaaggtaataaggcagtcatacacaaggaagatttcaaagactggagataagtcaagcagtatctctagcagttgttaaggttgtgggaatggagagaatgacaaaagtgaggatgttaaaaaaaggatcaagagggttttataaggtattgaatctgggaaacaaatgagcagaggctgaggatcatcatttgtaggagacagtggggtacagggagcatgaagaacaggggagaagagaccagcaggaataagtgctgagaagcaggagtttagtgggaggaggaggagatccagtcccagatacaggcaaagaagtcctttctctctcccaagcatggcagtcagccctgcaggaaacaggacaaaaggaaaggccatcatacctgcagtcttcctgaaataaactacaccagggctgctagatcagagccacactggccagtacttcaatcaagatgctgaccgtggctctacctgaaaggccaggagaacttccttgtactgaagtatctgtcatggaaagaaaagaagagaaggaataaaggtgatgttattttacagtgtggtaccttagtaaccatcactaagtatgaagtagtttctacttgttcctttggggattacattaattttgtgggagggttgctggtagatgattagccaactatattcttacagttttttttctctatcaatgtgtttctaggttagtgatcagtcttctgtcaatttcatcctgatcatgctgcactcagatatttttgaagcctttatgatgtgagaaaggctgactgctattttctgtgtcattagaactttctaccctttcatggttgcatctttttctcagtgtgtcagttgtggtaggtatgaataagactctgtcaggtctccatggcagcttgtgtttctcaagaggattactgagttcttggtggagcccattaatgaatagggccgagaaagtataggcttatgtatgttgaaaaaattccctaggtaattccagcactcccagctaataattgatttattaataatcgattgacttgattgacagaaggcccagatcagtgcattccaaattgacaacctactttgcatagagtcctcactttcctgaagctcccagcagggatatgaaagcaagcccagttctatgagcctctgtttcattctcctgggtgactggtggggagactccccatcagtcttgccatgatctctttgaactgtagctaaatcttctttctctttctccttcacaggaatcagatttgatagtggtcccaaagcttcccagacttttttcatgcctgccccactttccctcacaggcatttttcctaataaattatcctgcatgtctaatctcatcttggatgcatctcagtgggcataaactaacataccaggcttgatttttttgcacttagcttttttctgtctctcccacatgtagccagtaaccatgtcctagtgtttatgtgttacctcttttttcatgtgtataggaaaaatatatatatttccatatacctatttatacatattatataataaaatatgtaatataaaatgtatagtaatgaaaaacatatacatattttccatatacgtatatggaaaatgaggtaacataaaacatcaggacacttacatataataaaattgacatatgttatatatgtatgtagtgtctgctagtcttaccctctctataaatacacactttttgtcactgccccttccttcccatgcagagctcccatggccaaatctccctatttccccaagtgtgtgtcactcgctgtcctctgttctgtgtcccatgcgctgtgcccacagcctcctagtgttttatgtgttctctttttctatatatatatggaaaaagcatatacatacttctctctttatatttatatacaatatataataatctaaaaatatagagtatataacaatttaaaatatatacatatttccatatctatgaaaaaaggtaacacataaacactaggccatttatacataaaattcacatatgtaatataaatgccaattttatcatatacaaataagtatatccatatagacttatcatatataaggtgaatttggaatgccctgacctgggccctctgtcagtcaagtccttgccatggaggccattcatggctgccacaactgagacaccaagagaaagatgcaactatgaaaaggtgaaaagttctaaagtcatagaaaatagcaatcagcctttctcatatcccaaaaccttcaaaaatatctgagtgcagcatgtccaagatggaattaaaaacttcgatcttgaaaaggaaaaaggaagctggaggactcacactttcagatttcagcatctactgcaaagctacagtaatcaatacagtgtggtactggcataaaaaaggacatagaaaccaatgccatagaatagagaacccagaaaaaaagcttgcatatatggccaaatgatttttgtcaagagtgccaagaccattccatggggaaaggacagtctttttaacaagtgatactgggaaagctggctatccatggacaagtatgagttgaacatttacctcacaccatatccaaaaaaatgaacccacaatggatcaaagacctaaatggaagagtgaagactaccagactcttagaagaaaacataaggaaaaagcttcatgatattgaatttcagaatgatttattagttacaactacaaaagcataggcaacaaaaaagggataaattggacttcatgaaaattaaaaacttttatatatcaaaggccattatcaagaatgtataaaggcaaactatgacatagggaaagtttctgcaaatcatatatctgataagggattaatttccagaatacatgaagaacactacaaatcaaaaacagcaaaaacagaaaagcccaattaaaaaatggacaaaggactaaaagagagatgttattaaagaagatatacaaatggccaatgagggcatgcaaggattctcaatattactaatatttagagatctgcaaagcaaaaccatggtgatacacgacctcacacacattaggatggctttgataaaaacaacatgaacaacaacatcacaaaacaagtgttttcaagtacgtggaaaaattgaagctctttgtgtattgctgatgggaatgggaaatgttatagccactgtggaaaaaaatggcatgacatggccggctcatgcctgtaatcccagcactttgggaggctgagatgggtggatctcttgaggtcaggggtttgagaccagcccggcaagcatggtgaaaccccatctctactaaaaatacaaaaattagctgggtatggtggcatgtgcctgtaatcccagctactcaggaggctgaggcatgagaattgcttgaacctgggaggtggaggttgcagtgagccaagattgagccattgcactccagtgtgggtgacagagcaagaccctgtctcaacatcaacaacaacagaaaagaaaatggtatgtcagtttctttaaaaaaaattaaagcattaccacttgaaccagcaattctacttccggacatacagccaaaagtattgaaaaatatttgaacagatattcgtacactgatgttcacagcagcatcactcacaatagccaatgggtggaaacaaccgaaaagtctattgaaagataagtgggtgaacaaaaaggtatatccatgctttggaatgttcttcaatcttagcaagggataaaattctgacacatggtgcaaaatggatgaaccgtgaagacattatgcaaagtgaaataagccagacacaaaagcataattattatatacttccatttatgtaagatagttagaatagtcaattacatagagacagaaattagaatggtgattaccaggggttaaggggagaaggaatgagagttatcatttatcgggttcagaggtttagtatagtaggataaaaaaagcactggaaatagatagtgttgatagtaacacaacagtaaattgcacacttagaaacagttaatggtaagtcttacgtatatagtgtctggtactcttaccctctctataaatacacactttttgtcactgttccttccctgccatagggagcttctgtgagttaatctccctatttctccaagtgtgcatcactcactgtcctctgtgctgtgttccaggagctgtgtccacaaactcacacaggcagtgacttcagagccaggacacagtcctattcccattttttaaagccttacccatgggaggcttagcttctactggcagctcgatttagccagattcagaaccggccacccaggcaccttatccacatgcctgccccaccccccggctggagtcagggcagggtcggtcactgagcgagcccacagcaatgcagggagcagagtctgagctgcttctgcttcacccaaggggcttcctcctgtcatttggggaaaagtgtgggcttgttttgaagcctctgatgttcatcgcagctcatggagtacacacacacagacacacacacaaaggagacagaagggatgttttggtgacagaaacagcttgaccatgaggaccctcctctttctccgtctgtgaaggcccttatactgcatagtgcttggggctgataaagccatttccctacatttctcaggctggacccaaggtcatccaccagaaatctggaaaacaaagggaagagaatctgtagatatgaattgggagtgttcaggagaaaaatttgggatttacttttgtgcatgggacacaggctgagaataaaaatgttttcctggctctttcttggaaagccagataggcttcacctgaaagcatattgccaatgctccagcgatccacttaccagggactgtgattttcttggttgcgaagtttttgccattagtgactgggttatggacataacacagatagtccccactattctctgtagtgacttgggggataaagagctcttgtcctgtttgctggttattcccattcagcagccaagaatactctgctgatgggttagagcccatgaggcaggagaggttgaggtttgaccctgcatagtaataggtgtctgaagaataagttgtgggttcatctgggccatctggagcaaagagaataaagccacaggtaatgttatcagagggaatgggaagctcctggtctgtgaaagggacacaatgttcctttttgccaagtcacaaccctgaagtcccagccaaatttcttctgtgttcactgaactggaggagtctaagacattcacgtgttctcccatcgcaagctatggaaccagagtcccctaagaccggagaagcccctcccttcctgggcctacccaggtttgcctgggacagaaagtcatggccagcttgggggtccaggggtaagtgtcttcatacttggacctgagagggactgagaggcctggcctcgtgttatgtggatttgggctggcagccttgtccatgaaggaaaagaggatactcacagagaacatccaggtgactgggtcactgtggctggtactcactacattcttcctttgacattcatagagtcctgtgtcactccttgtgacactgagtagagcaaggaccctgttatcattggacatctttagcctgggactgagtgtgagtctatgactatttacccaccacatgtagattgtgccatgagtctcaggttcacaggttaagaccacagcctcctcatcctccgcggggttgctggtgacatagggcttgggcagattcactgtgcagataacagagaagattcccctgtgtggcaccattgatttctccacgagcattttccaatcagagttgacatctcccacctctcagccaatccaagtccttaaaagcccacagcagttctgtgtgtcaaaagacagatggatgcatgatgatctgagggctcagagaccatggggccacctgctctgtgtgggagatgcacagacttctgaactgtgaatcaagcagcaatactggtgaactgtgaattgagcagggtcatataattagagtttgattaactttgtttaaattgggcagagtctaagtgaggcagcagtggctcatgcatctccccacccgaaggaccccaccttatgacactgttgttattatgagtacacaggtgtgcatgaaacaggcagtaaatcaaacagcacccacctggccagctccacctggtcctaggaaccaccagtattcccattatgtgtatgttacagcctttgtaggctacaaaatataaaatacaacttcagaatataaaatatgctattgtcaataccaaatattgaatatgaagctgaatatgttgttccactttttctcactcttgttaaactttgctgtttcagttttggaagttcctattgacacacacttaagctagagattctttcctcagctgtgggcagcctaccagtaagcccatgcagggcattctttatttcgcttaaagtgtttttaatctctagcatttcttttgcttctttcttagaatagccatctctctgtttaaatcacccatctattcctgaaaggtgtctcctttttccatcataatccttaaccagagttgttttaaattttcagtctgataatttcaacatccctaccacatctgtgtctggttctgatccttgctctgtttttcaaactgcattatttttttttttttttttgccatagtctgtcttgtatttttttgaaaaccacacatgatgtactgggtaaaagggacttgagtgagcaggcattcagtgacatggtggtgagtgaggggagggaagggttctgtggttctggatgagatctgtgtcctgggctgtgaatgtcacaagtgcctctcaggtttttctttccattaggtgggatatgatgacttgaggaggctggagttggatatttcccctccccctggccagttaagctcccatcaaaccccagctaattaggctgcagtaaaatagttcctcttaaatgtaggtcttaccaagaagaatataattcactgacaactttccaagtgtttttttcccttctctcctacaagaaggatgcagggattctttttggatattgactgtgagaacctggtagagctccaggagctaagagtcataaaactgtccccctactcccaaggctaattcatccactggtgtgtttatctctgcgctgtgtccacactgagcctccagaatttcctcaattagagttgaggttttctgaccccagcactggttcccgctgaggtttctgtgcctgtgtttctgctcaggtacggtgcgctgctctgtatttgcctgtgggtctcttcaatatgtgggccagttagcactgagaccttgcttctctgacaaatctaaatgagttgttgttttttcagtttgttcagctttttacttgttgttagaactgagtgaaaatttttaagctacttacatgcctggcggaaattcgaagtctctagggcatgactggaggatatgagccccacagcaggttgaggatggagtcatgagtgaaatgggtgaaatgagcccatgggctttggaaactgcaggtctgtccttcagcgtctgaccacctggtgagtctatgtagaaagtgaaaccacctttgcaaagcatatgatggtgagaggaagctagcttggctgaccccatctcacctctagcctcaggctgggtgtcctctctgattcttgggcataggccagggtaagcatggaaggaatttatagtttaactttgacgcaaggatgataatagtccctccctaaaattagctccctccttgtcggggactaccgtggtaaatctaagaaaagaccatgaattatgcaggagcccaaattctgctaaaatgcaggcatagtttctataatcccttactgctcaggagtcatgtgtccagaggtcacaagatttgtgactttcctagttgctcctatagatagcaacactattgtagaatctgagatttgtctttggagatgtttctcagatttttgcattccggcaaccagctgacctcatctagactcatgaccaatggctcaaccagtcatgtggccccccactcagaggcagattcaacaaatacagaccatttcccctaccggcatcatttcatctttagccagtcaacagtacttattccttagaactttgcccctcaaagtttttgaaaaactctaacctctgagccactggggaagctgatttgagtcataataaacttctatcctcctgtttggcagccttgggctaagcaaaaccattttttactacacatcaccttcacaataaattggctttgcctgcgcagagggcaagaacctgtcaggtgattataagaatggatggaggagtcactgatctctttctggtggcctgtttcatgagtcagcctctcagagggaaagagccctggactgcgacacagtggaagctcattctcttggtgacccagggacattgccttattatggatcctggcaggggtggctgctttggctgattttggtgcattttacatttcccagaaggcaggacaggcctaagtgtgagcagaaaggaaacggggcagtcagctttgttagagagggtgtctggggaagtcctcagggtggaggaagctgtgcaggacagggctcatcaggtagaatgaaagagggatgcacttttttcactgaacacctttcagacatctcaccaactctggcctcactgggctgtgcctttcctcctgagccctgagccctgattcctggcagggagggagaaagagaggaagggtgaagctgggatgtgtgctgtccaggtttcttccatctctagaatcttgacagcgagggaccctaatgtgttaccacagaggagaccatgggaaaaagctgtttctcaggggtgcctggcttatgaagtgagggaaattcagaccgagttggactcctgaactacagggaacctgttccatgtcagcaaccagctcctctagctcagtgtttctctctgtggctaattcttttgtatggtttctgagcctatgctagagtcctcctcacgatgcatgatggtcagacctgtgtggggagacctaatgatggggtgggggtggtcttgagtgtcacacagagtgtccagggaacaggctttgtgactttctctaccccagccccacaacaagatctggatagtgggctgggtcagataaagtcagaatccatggggaagggtatgtgtcctggcagtgccgaggttcgtgcctccaggttagctctgagtctctgcaaatacatttatgttgtgcatgtgctgtttgctggacggtacttcttgaacctgtctgcagataatgtcatgagaggtctgcatggaagtgtatgagggctatgtgattagggtgggtgtgttttacacagcgggtttttttttcaccaaacacttttcaaaaaattgtggttgagtgtgtatatagaaacacatacatacttgtatttgttagatgtgaatatatattcatataaatttgacatgtagatacatatgtctataaatatacacacatatatatgtgtgtatgtatatgtgtatatgtatatatatgtatgtgtgtgtgtgtatatatatatatgtgtgtatatatataatgtgccattttaaccacttaacttaaggagagagatagagggagagagaagagagtttctactaataccaaatctgggttaaataagggtggtcttatttcctggggttgggcttttgctacatgtgtcctgttggaagtgagctagagaggttacatgcttaaccaatttagagattttctatatgaaaatcatctgtgagcacattgataagttttatcctcttctacgtgaaaagcttgatgaaggattttaaggatttctcgttggctgaaggctggcaaacggagtttgccatcctctgactacagccattctgaggactggaaaggataccctgagaagtggcctattttatttctgcaggaaggtactgaggtttaatttatcttatggagtcttcctagattagaaggctttgaggtgtgttgatgccttgccagtgacttagctgcctgatcagtgaacctatttcttttggctacttcatctgttccctttttgatgttctctataatgtatcactgctatttctcatgaaagaaaactgacgataataacctgttaattttttggtgatattttataggaagtccattagtggtaagaaaatgccttttattttaaatggcagcatgagcatgaagaactcaaaaagcatacttggaatcagtgtaaatgttagctacctttcccttgcttaatttaagtgctcttgtattaactgtttgtttagctgattgagcacctgcacctgaagagagatattatttagagtgactactgcttatcctaccttacgtatttcttgctttaccagctgattgttagctaagagctccctctagaggaaagtaattttgccacattaagtgggggtgtaaaccgttttttcctagggttaatttggaggcttttctgattagtagagctattgtgacagtggtttggaagcagatgtaaaaaataggtcctcctaactgcaaataagaggctgagaaaaatattggattagaatttttcctgagacaccccttatggttgtgctatgggaagaggggaggcctggataagaaaggagaaaagagagagactagatctagtgtttagaaggaggtctactttcctccctataatttccagaatgacctgtgtctcctgtgctgtaatggcagtttgagctgctggagccaggggtttgagccccaggacccatcagtcctgctggaccactgtgagactggttctgaacccagtgacctccatctctgggagcagttgcatctccagtggtctccaccacaggctggacagggtcaaggtggcttcctcttgctctttggacacttcttcctcaaatgccctggcttgccacaccgagagcaactagtggatacacctctgggatcctggactttgcaactctgcaaagcagctactagaggctttgtccttctcttgagctttctctctttcttctgggccttctcctagtccctattataaaagactgaagtggctaccctcagaaggttttccaaggtgctatctgctactatagcttgccttttataggttccttctaatattgggagctttatgtataataaacttatcttttggaatgggctgtcacttgactgaatcaggagataaaaaggtgtgtgctaatagtgcccctctcaacctatccataaaggctgcaggattctcatctggctttgagtctatcctagacagtttagaggaattaagaggtctggccttagtttttctttttcattcatctacagggctattggggtttcaatcagggttgtcaagaggtactgcttcacttactatttggaatggtgtttctgctatttcttcactttctgtatctccttccttcccttttggtgtattataggagatatgttgctcatctccaaaattctctgctgcttgcagagctgcctgtttttcagctgcagttagggtttggattaggagcagtataacatccttccatgtgaggtgaaacacctgacttaaattctggaaagcttctatatacctgtcaggattgtctgaaaattggcctaagtcttactttatttgcctaaggtcctgtaatgagaagggaacttggagggaccccaaattatggagattctcagatggttcccttggaagttgcttttctaattctaggatattattctttataagcctgcctgatatggctgttaaaaaatctgggttgctgttacaatgcttgtaaaggtttagtaaaaatgccctgtcattttgcaaaatagaatgagttgcttttctcttgaaagtcctgaggttaaaagagttctagtgcctcagagtgcgctccagaggggtgcaagctgaagatgctctgttagccattgagaaaaagaagtgagaataaaagtgtccttatagtcctccttatttcattgagacccagagtggagtggaagacagtgggagcgtccccccaactgttttctctccttggttcctgagtcccggcactatgttaaatgtgctgcccatggttgtaggtgtggccctgtaagccatggaactagataaatgaagtgatgggattagccacactttacccatgcaacattagcttatctgcctgtgatctgcctggcttcctgaaaaatggatctctcgagaaactgtaacagttgcctttgagcaagctttctttaacagagggaatgtgccagttgccagatacgtgctaaagcatttaccctcagaaaagtggtcctggttaactctgttcttaaagtatccttactaattaaatactgttctaattggagatagaataggtactttaaatgaatgtagggacctaatggcagtttttcctgctgatgcagcagtatcagaactaaaatttggctatggaagacattttactcctaattgttgaaagcagagctttcccattcacagaaagggcttttctatcagtgcaaaaagagagaattggaaaagtgcagtgttatggcaaaggaccaacaatgtgccttatgaggaggatttctatttctactagatgacattgttggcttagaaataccacgtgcttaccaaaggaaggagagagagagagagagagagactgagacacctattgggttagttattatagcatttaccgatctttcctaacagaactgtttccctgaactgtaaaaatttccacatattgcatacacagaaagaataggagacatagagaccatggatagaaaggaagaacaaatttgcaacaggatagcaaattaggagacccattaccaacatctggatgggctgccggaggctgtgttcagtccagaagcctttgaataacatcagggtgtgtcctggccagaaattctcagctgttccaggacatcccccagcctcatgtgatggtgaggttctccatgaaaggaaactagttggaagagaaccttgaaattaaaggacagatttgaggtttgctccatactcaccattctgatgtttctatcttctcttctgatcacaatcccagatgagaactcccaaataaaatgactctgtttgggaatctatccatggttctttgtcacacactgagaaagaattcaggacatggaaacacatgaggagtgtgtttaggattgaaaaatttaacagacaaaaaagaagagagagagaaaaagctttctcatactgagaaagcagtcacccaagagagggtctccaatttggggtggaatgcaattgattttgtacagagacttaaggaggcagtgattgatttacatagggtccaggggattgttttgaccaggtgttccatttacatagcctgaaaaaagactggccctcccatcctattcttttattatgcaaatgtggcttctacctggtggtcaccatgaaattaggagatatacctaatgttaaatgatgagttaatggttgcagcacaccaacatggcacatgtatacatatgtaactaacttgcacgttgtgcacatgtaccctaaaacttaaagtataataaaaaaataaaaccccatggtaaatttctatttttttgtgttaccttggcatctatttttaatcttccttgaacacaccaaattttctcttgaaaaagcttaagttctctctctctctctttgctttgagatgtaaatgtgctatgtattttctctaaaactaggtaaagccttcctcagataaatgttaacctttaccatttacaagacagcaatttgaatccaactatcctttaaaatggtgggttttactgatctcatgcctaaactcctaaaatcaaaattctagaatctttttgtctctctctatctttatgtgaacatatatatgtttcatcacatatatgtatatgtcacacgtttatatactgtttacacatagtatcaaattaatgtaaaaataaatgagtactcacaaattaagtgaataagcccaaatgcttttctatatatgtgattttagtaacctttggtgaatatagatagctttaaaattgttggtaaaataaagtagaaatgtcttcataatttaatttatacacttttgcctatgtctgttggcaggcaggtttatattgtctttactagatgttttaaggtcatcaaagagttgcttgtgtatatatacattttcttaatttgtctgtgagcttatgtctttatatttgaagctttaaattctgagttctagatgagtgaccatagtaagaactggggacaaaacccatcccatcctccagctgtgccttttggccatgctgggagaggtgggattatccaggcattttcttcatagctctgttctttgtcttgggctttgcatctggtacatagttagaatggtttactccctagttttttttctactgaaaataaggctgtataagtctgtttttacattgctacagacaaatacatgaacctgaataatttataaagaaaagagtttgaatggtctcatgattcagcaggttgtagagtaagcatgattctggcatctgctcagattttgaggaggcctcagaaaacttacaatcatggagaaagccagtggtggaggaagacatcttatataatgggagctggaggaagagagcaagggttgcacactggtaaagaaccagataaaactcactgttgctataacagcaccaaggagaatggtgttaacatatgagaaaccacctccatgatccaatcacatccaaccaggctccacctccaactttggagattacaatttgacttgagatttgggtgggggtaaaggtccaaaaaaaattattctctccatcttccctcccaaatctcatgtctttctcacatttaataatataagaatggcttcccaacagtctctagagtcttaactcactcagcattaactcagaagtccaaaatagcaagtttcatctgcgacaaggcaagttccttttacctatgagcctgtaaattcaaacacaagttagttactttcaagacacaatggaagtataggcattgggtaaatactcccattccaaagggaagaaataggctgaaggaaataagatacaggccccatgaaagtctgaaaccttgcagcacagtctttaaaacttaaagctccaaaataatctcctttgaccccatatctcatattcagggcacactgatgtaaggcttaggcttccaaggttctggacatcacaagaacattccaagagagtcacaaaagaatttgtagtgtggcttttgatgctaaacagcatattagaccaagtaagtcactgaagagaaaaaagtcagaggagaagatgggtgagggtgacagaaatggaatggtgaaaggaaaggtctgataaaaaagtttaccggctgggcatggtggctcatgcctgtaatcccagcactttgggaggccgaggtgggcggatcacaaggtcaggagtttgagaccagcctgaccaacatggtgaaaccccatctctactaaaaatacaaaaattagccaggcgtggtggcacgcacctgtaatcccagctactcaggaggctgaaggcaggagaatcacttgaacttgggatgcggaggttgcagtgagctgagattgtgacattgcactccagcctgggtgacagagtgagactccatcccaaaaaaaaaacaaaagtttacccaggggctcatctggtaccttgctctgtgactaatatcttacacattttgatttactcttccactttcattttctgatgcgtgaacggtcacccttctgctgaagatgagaaaagaggctgaggcagctcaaatgagtggtctagagtcatccagctacttcatagagcttgtgtctttcaccttgacgtttgtgcacagacagaaaagagacacagaaggaaggcaaagcaagtttttgttgtgggtgatatttatgaaagttacctgtgttaggcagaataacggactcctaaaatgtttgcaccctagctctggaacctgtgcatttacttttcttggtaaaaacacagtgcaggggtgataaaattaaaatcttaagatgtagatgttattctagattatctgggtgggcccattgtaatcagaagtgtccttgtaagtgacaaagaaaagcaggggcatccgtgtgagaatgatgagcctgtgagactccactggccaatgctgggtgtgagcatgcatcaaaagacaaaattacaactaatgtagttatagattttatttttcatttattatttgaggcagctctcactctacaaatatagtgacagccctccctgggctatacaataacaaaacagtgggttttgtcaagtgggaaccagtaaacaaagccatataaataaataaattggtgaacattagggtacttcaggtcacttttctgtaaaagttaaagcagaggaaacttttattatgctgtctcaggtagagtggaatctcctgttttcaacaaaaaacaaaggtctgttctggtatctctttgcttcattaaaatttcagttgtagactgtagcatttagcatgagtggttctattttggagtctctaggctctcacttaggtgagagtgtgaccaaaatttaaagcattggcattcatctcagtaaccatcatattgggcttccatcatttataggtttatgatgtcttcctgatcacacatttctttgagtttttgtcatttcagccaaagagagaccctttggtatttgttgatggctgcacacaaaactttttaaaaacttttgtagaattcaccacaccaaattgtagaatttaaaaacctgtagaatttatcacaccagagaggctactagtatgactattgggaggataataccaaaagtttggagtatgcactttaggcaagatgcaaaccaagtaaaatagaatagatcaaagaatgagccagaagaatctagcaattttaaccaagtagtatgtttggtaacttttgtgattgagttgttatgatactcgatgtatttgtttatgtgcaacaatcagtgtcagaaactgcacaggctcctccctgttcagctggtagggaacaattttattatgtagcattcgatggctcattaaattaaaacagggaatgagaacgagtctgaaaatgtaactttaaaagggaccactgtacatttgaacaaacaattgtgttaaagatggtgctaatgtcagccattgggtggactaaatgatatcttatgtaaaaatttgagggtgacatgatatatctgtcactctgttacactactctcagaagctacttcatgtgaaattctaatgataccatcatcctgccaagtgaaagaggcaggcataagcatggacaaattaagaggggtaagagcctgattttgatgtggagacttgttctgacaacttgggaaaagcttttgacagtgtgaagttgtcaacttcttatcctggttttaagtttgagtgtctgtagttatggtgtcaaacatattggtgagctctgagtgactcatacttcagacacgagggttttcccgtgaaatttacattgagctttccacctccaacttatagggcttcaggaataaagcagattttgttcttactgattcaataagagaaaattggatgggaggaactagaagaattcagggtctagttcagtctaccggtgaataataaaaactcaaaaacaatgaacagagctgcaatttcatagcaggtatactacactttttattttcaacgttatttttctctctataagaatatctatttttaccaaagataatcccagtaggataaatttgtttccaaagtaggtttagtcttatcaaactttgccgggattctttacataagtgcatcaagagtagcattggaccacagagactcttcctaaagtttgcatcgctagacgtttttataaggagtctcagattaaacttttacaaacctcttgagatgaggaagccaaatgaaggccatcttcagactttgcctgcagtacttatgggtccattctatgtatattctcaaatataacatctcagtcaaagccttggtaatataaccaatgttttgaaatgtgtccttttgtaaagagagaagattcttactaaacttgtgcaaataactgtattagcataaacatatgaatactcatgaatagtttcccaatcctgggacagttaggtaaagagcaaaaataaatgggcttcaattattgtttccaaaagtatactttaccaaattgctttagatatagctagcttaaaagaagaaaaattccataaatctggaaaaaatcatttaaagaatcagcaaattttcaaataaaaattataaaaacattatccacattatcatttatttcaatgaaattatttttgttaagcttggcctaggttggcatatttcatgaaggcatcagcctgtttgttaaagttttggaagtccatagagagtccagtggtataatcttgaactgctcagaaacttgtatgcaagagtacttgtcagtatcttttccataaatcttttgaaatagaagcaattttggactgtagctgattgcagatgctttcaggaagaatcaaaacaactatctgtgaatcaccaacatgtaaaatgactgttgttaaaactctgataagagtttggtataataaagacagtaactccagccagtactccaatcatgatgctgacagtggccccaactgagagaccaaaagaactttcttgtcctgaagcagctgtcatggaaaaaaaaagaagagaaggaataaatgataaagacagctcacatagaaatttagttacttctgtggcatattacattctgactaacttctgtggaatatgacatgattattataataacatattcagtttctaggaatctcataattttggggacactcacatcagtaacatacccataaataaaacttagagaaggtttagcatcacttatcacttatcatttgaaaatgctttttatataatttaacatatcaaataaggtggcttttccatttagcttctgtttctcaactggattagtgagttgttgatgtagcctattaatgaagaaggacaacattatcgagaatgtgaaaaggcaacccatgagatggaaaactatttgcaaattatacatctgataagggattaattttcaaaatattatattcagaatatttcagaagaactacatatcaaaaacagtggggggaatagggagttgttcagtgggtctgcagtttctgtgatgcagaatgagaaagttctagaggtctactgtacagcttggtgcctatacttcatacagattgagtatttcttatgcataagacttaggaccaaaagtgttttggatgtcctactttttttgattttggaatatttgcagtatacttactggtttagcatttcatattttaataattcaaaatccaaatgttccagtgaacatttcttttaagcatcacatcaggggtcaaaatcgttggattttagggcatttcagactttggatttttagatttgggatgctcaatgtttactactaacatttgcatttaaaaattcatcatgagtttggacttcatgtcatgttctgacaatagtaaaatgaaaatttgcaggaaacattttttttctataagtggacactgttattaacggcccaaagatctaagatcgattgctggaagtagtattcatcttgataacataaaaaggtttaggtctgctctgaattccagttggatcacattatgctcaaagaaaggtgctgaagatggtttggaattagcaactccctgggtagtgggaggcatgtgcattctgttgggaggacaggattgatcagagagaaagtcttaggtgtgtcaattacataaagtgaggaatgacgccaaattaagagaagtgatgtgtgttatgttagtgaatttagaaagagctccctgcttctaatttctgtgcagttaggcaaaaaggggaggagcccaaaagaggcatgtgaaatgctttcatcattttctcttgatctcaagaaacactagagtttgattacatttgtttaaattgggcagagtctaagggagacgccagtgcctcatgcatctccccacctgaaggaccccacctttcgacaatggtgtcatcatgaggacacaggtgtgtgtaaaactggcagcaaacccatcagacagcacccacctggccagctccatcctgtcccaggaaccactactattctcattatgtgtatgttacagactttgaagtggtcccacaactccaaaatataaaatatgctattgtcaatacaaaatattggaaagaaagctggataagttgttccacttttttcgcattctttttaaactttgctgtttccgttttagaagtttctgttgacacaccctcaagctagatatttgttcctcagttgtgcccaggctaccaggcttcttcatttatagacttttttttatagcattgtttaaagttctttcttagaatatccatctctctgcctacatcacccatcttttcctgcatggtgtctactttttccttcataactggtaaccagagttgctttaaattttcagtctgataatttcaacatctctgccatatctgtgtctggttctgatccttgctctttcaaaccacattttttttttttttgccatagcctgtcttgtacttttttctgttttttttttttttttgaaagccagacatgatgtactgggtaaaaggaacttgggtgagccggccttcaatgatatagtggtgaatgtggggagggaggagttctgtggtcctgaatgaggtctgttccctgggttgtgaatgtcacaactgcctctcagtattttctcctccttaggtgggatatgatggctagagggggctggagttggacattttcccttcaccaggccagttaagcttccatcaaaccccagctgattcggctatggtaaaacaatctttatgaatacaggtcttgccaggaagaattgaattcactgccatctaagtggttcctccccatcccccacaagaaagatgaggggaattttattgaatattcactgtgaaaacctggtatagttccaggaagtgagagccataaaattgtcctcctaatcccatacctgatccatctgctggagtgtttaactctgtgccttgtccacattgagccttcagcaattcatcagttacagttcagggtttttgactgtgtctggataaggtcagccggtggctaggatgcaaaagacaccccactgagtttctgggcctgggtttctgctcaggtaagacgtgctgctctgtatttacctgtgggtctctccaatttatgggggagttggctctgagaccttgcttctctgagcggtcgaaaagagtttttgatttttaagtttattcatctttctacttgttacaactgagtgacaaccacagcaggatgaggttggagtgaaatgggtaaaataagcctgtgggcattggggactgtagacatgtccttcctctgatcccctggtgagtcagtggagagagtgaaaccacctttgcaaagattacagcagcgagatggagctagtatggcagacttcatcttacctctagctggaggctggctgtccttgctcattcatgggcataggccaggttaaccatgggaggaatttagtttacagtgtaattttgaagcaagaatgataatatccccttactaaaataaactccctcctactcaaggatggtctttgtcaaagtaatacaagaccataacattaggattataggagggaccaaaatcctgctaaaatgtagtcatagtttctataatccattattgctcaggagtcatgtggccagcagtcacaagacttgtgatttctttaattgctcctatagataacatcactattatagattatgagattggtcttttgagatatttctcagacttgcattctggcaaccagctggcctcatccagacccgtgagcaatgcctccagtcatgtggcccccagtcagaggcagatcaaacacacagagacgatttcccccacctgcatgatttcattcccatccaatcaccaggacccattccttagacctcaaactttttgaaaaactccaaccctagccattggggaggttgatttgagtaataataaaataagctcctgtttggcagccttgggctaattaaaatctttctttactacaaatcaccctcttcataaattagttttgcctgcgcagggagcaggatggacctgtcggtcttcctgtcaggtaattataagagtggatggagaaaccactcatttctatctggtggcctgttccatgagtcagcctctcagaaggaaagagccctggaacaggatacagtgaaagctcattctcctggtgacctgaagacaatggctcataatggagcctggcggaagtggcaactctggctaatttcagtgttttttttgggggtggggagggggtgcagtcaggccacagtgtgagcagaaaaggagcagaatagtcagcttttgtctgaggaagtccaaagcatggagaaagatgtgctggacagggcatgccagctagaatgaaggtggagccgggggcagaagatgagggacacagaggagcagagggagccagagacacccatggcagggagcagtgaccccagtgaccaggggcccccagggtctcagttcagtaccagggatccctgaaagccctcccatggcctaggaaccctggagtcacatgagacgaggtagctttagggacagggagtaagagggaaggaacatgggtctcagcacccaagtgatagggaacaggtgtggccagaaacctctaggattctgcatccaggatccggtccctaaagaggttatgaatcattcattccttcattcaatggctccttccctcatgtgagaactacagagtgtgtatctcacactgagcctgtgttagtgtgaatggggagagaaagccaagtcctctcctttattctttcatgggaatgatactgactctttggaaaacacaggatttcaggttccatgaggaggattaggatctgagggaaaggtctggacattcctcctactggctctgacagttgaggcaggtgatttagttctggagtacaaacgaatcagtagtccatttgctctcactcctctgaggtttggatgcctaagaagaaaggatttgagccgacagatgaccatgggctccttagaacttaataagacctcacttctcatggaggagaggatggaggtgtggttacagaaagacctcgtgtgactctgatctgcccctcatgtttgtgtgaccctggttcagtgactgtgtctccctgtggctcagtttcctctcaatcatataagctaaatggtaaatggtctgtgacttgtcgtgttgactctgaatgaactttaaattattcacagtcacctgacctaacgcttggcatagaggaggtgttcacacaaacagtgtttattatttgccttcatgagtgagcaccctcagacctgatccctgtggacaagttgctgccgggaacatcttgtctcttctatttctgtcccaggggacactgaactttctatggggtctcctaagcctcccagggcagttggctgatagcctaagaagcttgtccatctgttcactctgagtctcaggtgaaagagaaggctctgtctttgaccagatgaggctcttggggctgaaccctgcctgggagcagctccagagccacatccatcatacagctggtcaatacttgctcccagtcagtcctgctcaggaggccacaacccagccctggcacaggttttccagggtcacttggattcaggatctgaggactgggttctggggccagggcttctaggcttctaggactgagcttctctataaggatcccaggggacccctcaaaccgggccctgatgtagttctccagggtctttttccgaatcatgttcatgggaagtgcacagggtgatgggctgagactgatctcctcctgctgagtttcccccatcagattgtcctttctctgcagcacgtgtcttcagagtatggatgcaggaaatgaattctgatccattgaaatttgtctaccctgtgtgtgtcctgcactgaatgcccaaacactaaaatgggacataatgcagagggggacacaggcacagcccaggcctaacaatcctgtgggtgcgtgaagtagaactgacccccaacacccagaggtcatgaattcctcacggtgtacacggaaatatccagttgcttcttcaatggtaaaatctgtctttatgatttgtagggtatagaatcctgtgtcatcctgggtgactttccgggtcagcagggatgcattggcaaatattacctcctgactactgtatgcaggtcctgagctagatctttgaatgcctgttgcatatcctaaaattcaatagtagagatccacacttcttcctttgtgccaattgtagcccatcactttcaggggcagattgtgggcaagtagaaaaaactcctcctcctcctcctctgtggcattgaatggcatggcttcagtagtgactctggcagtggtgggtgggttccagaaggttaaaagtgaggctaggatggggagggagcatcagtcaatatcaaaacctatgtattgggatggaaagttggggccctttgtccttagaggttctcttcacccatgagccttggagagagagagaatgtgtgtgtgtgtgtgtgtgtgtgtgtgtgtgtgtgtgtgtgtgtgtgtgtgtgtgtcctgctgggtcaaggtcagcagcatgacccccattccttcaacacctctgaacttggcatttccctgtgtggaatcctcttccccaggggtctgcatggttccctttccactgacctcatatcctgctcacatcagggcatccttgaaagagccctttcttgacacctccactagagattctgggtcttccctttctcacttttccctgctcagttttctccagggctcttgtcaacacctgacctcacattctagatatccttgcgtgtctcgctcccctccccataacagcatcaggttcatgagggcagggacttgtatgatcttggttgtaccgcagtgcctgggacatgctgtggactcttgtgaatgagtttgtgagcattcccagagccctccaaggcctgtgatttatttcccaatttctgaagttggtggctgatgacaatgccttataccctcactatgtttttatatgaagtgttatctgatatagttattatgatcatttttcaaaatgtagtggccagtgatgattaaccgggaatagagaacacttgagatttgtttgcttcttaccataaatttcagttcaatgtgattttcctgttttaatcctgtcccttctggtgtcctcttttctgttaaggcagcagtagaagctctaagtcctctttccccaggagccccattttccccaggagacccaagccagtccctgtgccttctcatttcctcttcaaggaagttctctcctcacctgtgaacatgagcttctgccagaggatgtgccatctggagaaagggactgataggggggcaccatggtctgtgctgcctgcttgtcctcctctgtggagatgagcctgggatccggaaagtttctgagcagggctgtcagctgggctgtccttccaccttctatgctgagcctcttcctggggcaggagcacttctcaggctcatgggtggggtctgtacccaggacacctctctgtgccctcccctctcagtcctgcttccttgtccctcctttctgtttctcttctgtctgtgtttcaggcccctgggaattgctgagtcctctgcctccttcagcagtgattctctcacccaacctctacacacactatgtgcagacacacacacacacacacacacacacacacacacacacagacatcctttaggtttggtaagcacagccctgggccctcagtgtcctcccatttccattgctccaggtcagggtgcacagtcgctccccctgccctctcccattcccatctggcttttctcttcaaagcaggaggctgggctgcaccatgaccctgtcacagtgatgcaccctcaccttgctttgggtgggctgagtgctggctggtgagaaggaccctccctctctttcattatgttgaactttgctacagcttccatggttagacattcgatgacccggttgtccaagagggtattttccttcgtggaggtgtgcaggatcaatctcttatgcctcctggtaggaaaggcctgtgctgattggtcagtggggcctatgggcccagtgttcaccagggacaggtctcagccactctcttggtccctgggttctggtggctgagctggggtgaggcccatccattttcttcctgaccatctttggtgtcctctgtccttggcccagctgactgtcctgtggtcaccccaccttccccacggctggtgcaaaagggagtggggtgatgcccagggtccccacagaacacagctcttcaagacccagagagagagactgggaaagaacaggggctcagagctggagagatttctgcagacttactctgcagccaggatgggcttagcccttcttgctatacatcccttggggttcctcttgagggattgaggcagatcaagctcctctgtgtagaagaagaacaggcagtggctggagagcctgcgtgaagggactttgctcacacctgagagggtgtgtgggggtgggccatgttctgagaacaaaaggagctcataccccccacttcaccttccccatgcacaaaggacagccctgtcttccctcccagcttcacgagagacagcagggggcagattgtgggtgagtagaaaaacctccagcaggtggccacatcatggatggtgcctgtgcgtgaccttcaaacaccctctgcacctcctagcgtgcaatgggcaggtcatagggtgcctggctgattcctaggaatactgtgggcactcaggcagctgctgttctgtgtcagcactgggatcagcctgggataacctagagaaccgtacagagggagtggggtgggaatgtagggagcagtcacagaaaaagttgataaggatggaaagaggtcacaagggtaaagtgcctaatatggcatcatgtggaccatcgctgcccttgcagatgcccttttggctgggtcagcagcccctggggagtcttgtggctgggattctgccatcctctggtgaacatgggggaaatttggatgacagcagccccaggcaaggctgcatgttttattccatgtgaatctgcacatttcacagcagattattcacctatgtcacagatccatcacattccagccccatgagtctcagtctctgtgactgtaagttcactatcctccctctatcacaatcagatgtcccaaacacagatttctgtcacctgtgagtttgtgtttgtgtgcagtgggctgcactgtgtatgccctggggacagtgatgtctgggtggggctgagcactgggcagaggtttggaagcagaagagggaggtgcagggcaggaagatcaatgacagaggagcagagagggagcagggacaagtcatctttgtttctcactcccaggggaccaagaatgcaggaccctgaccttagggctcaacaccacacactgttggtgtccgtggatgtcaccagtgctcgtaatttcatgttgccttggcattcatttattaaggtgtaagtttacctgctttatatcagaggcagggcttggtcaccgtgacagttcccaatactgtacctggccaaatggctgcagttggtggccagagataaaatcttagaggcatctctcctgcttagtgtgctgggctccccctctacccagctgcttcctttaaactgacggttgtgaaatttgccctgaaatttaaagtgaccacctctcagtcacagcgtggtcacctggccccagtgtttgcttgctttaaactcacccattaaagctttctgctggaaacctcagctaacgccttggacccactaaagccattggcctacaggtccctactttcctctctgcctggactccttgacctctgtgtctattatctctaggtgtgccatgtgctcctcagagtctgtaaatagcaaaaaaaaaatttgtactttcacattgtggttgtatcactatagcctcacctgccatctggtgcctgacattgaggctgccccatgggacccatgctggttgagcccctgctggagctcttttcttggggtctctggtgctgctggggacaggcactgtcaggtgatttgatggagaaatggaagagttttattcaaaacagtgtgtcagatgatgttttcatgggcttcagctgctgtaacaaacaccttagtctgggtgacttaaaatttagaaatctatttctcatagttctggagcctgggaagtccaagttcaaggttccagctgattcagtcctggtgagggcttccttgcagattcctgctctcttgctgtatctgcacatggtgcaggcttgaaggtgggtggagagacagaaagaggtagagacccttctcccatgttttcttctatttataaggtcattaactctatcatgaagcctccacttttatgacttagtcttactgtaattatctcccaaaaatgccacctccaaatttcatcacattaaggatgagggctttaacaattttgagggggcacattctgtctggagcaggaaaggtgggagctccttcccctcctgttcatgaggcctgaccttccctggtgagataacttcacattcagtctcattctaggttgcagctccacagagcctgggttctcctctgctcttctgcccattcctgggttttccttcttgcaccaccttctccctgtggccccacctgctcctgttccaggcagctgtccttgcgttgctgctctctcaccatctctggcctcactggcctctgcctttttttttctcagccctgaggccagctccatgggagggaggaagggtgaagctgggatgggttctgaccaggttgctgcccgctatggaagcttgacaatgagggacgctgttgtgtcaccatggaggagtccttaggaaaaggctatttctcaggggtgcctggatcaaaaggggggtggcacttttaatttagctggatctgtgaactacagggactctgctccatgtcagcaaccagcacctccaacttttggtttctctctgtagctgattgtcttgcctgtgataagatcctcctcacaatgactgatggtcacagccgtgtgtggaaacttaatggagggtcttgaatgctcacacagagtgtccagggaacatgcttcctgatgttgagaacgggtgctcagtgtcataaagataaacactgagacaaaggatctctcagaaaggctagtttactttctgcagaaagggtgtcactcgctagcagtcttgccatgacagcacacacaaacaaaggagacagggtcatttataacctgacccgtccaccctactgctatgtccagcttctattggctggaacggacctcccaatttgtacttgacttgattggctagcaacttagaactttcccaaagaggcaaaggcagagaataaaggaagagaggaattaacttgtggaatgctgagagaggcaaaaacattttcaagtagggaaaggaataagcctgacctaatgcttgcttggactggttcaggcatatcagggcaaatatctaagctaaaatgtggggtctaagaacacagagtatattgatttctttattatggctggcagaatttaagaatattagcacaggtctttgagaaaattgtgcttttaagagaggttactatttattttcaattagactgggaggaaaatccctttgaagaggacctctatttatttcattctctacaattctcccctcttttattttataattactcttcaaacttgtttaatatgttttgacttaattgctctgtttgtccttttaagagaagtaatctttttgaatatggtggagagttaggaaacaattttgtgagagtagcagggacaagtttttgtataaagctttgaaaacatttttatttatagttacccaccagaacaacaaagatttaaatctcacagctatttgatttcgtgctttaaatttatctggcacttcttgcgggaccccaatagtgtttatgtaaacctgaggattaaaggatttataaagagtttctttgggcctgcagtgttttgtttttactttttttttttttaaggctgataaaatgccagggtgaaagggatagccaattggattagagcataaatactcctccaattatctggcagagtgtccagtaaaggtccttcacagtactagcatacatttgctcaggggtggctaagcacagactgatgggcaagctcctggaaaggcttgagcttcttgcatccttttatgcttccaaggaacaccaaattctccacttgccatgggaggcacgaactaaacttggcatttagaggtggaagctggattgcccttgggggctgacccacagggtgtcaagctttaggaaacagcagagagagagctcagcatgatggattatcccaagcagtgggattttggtaggatttagcctgtggtagaatcctcctcacaatgactgatggtcacagctgtgtgtgaccatatggtccatacctggttgatgaggagaccatccgagtggaaaggggacaatctgggcgtctgtgcacaagcataacaatcactgttatttaaagtgcagatggaatatttaatccattccagccgggcatttgcattttgatacattgtcttaatggctaaggtttgttttagatctttcacctttgcaatagacaccgtagttttattataggtgtaggagtaagtgggatgggatctaaaactgaggctactgaagaaggggaagatggggaataatgcatatctaaaaaatgcatagggggtgtttcccatttaggtcgatccccataccatagaagcaactaagagtaggtttagagtcagttaaggtggaggtggtgatagagagaaggacagtgttacactgataaggctggcaattagaaggcgtagtccctttagtgaggggttttagatctgcacaaacctcttccgtggaagtccaaccttgcacctgagtagtccataggatgtagtcccagctactacaaggttgccaggctataggagcagaaaattggtgtctcggctgcaggtattcacaaccatgagtgctaggaggaactatgtcaactagagggccggagcataaatatttgtgtgaaaaagctagctgtcattgatccttcacatctttacaaggtatgacagagcatgcattaaaggcaatggtctgagatgagtcagacttagttatgttaataacaaaaggagctagtaacagaataaggaaaggaaaggaagcaatatagaagggatatggaaattaagcttttggttttttttaactttaacttgttaaggcttgatcccggtacactaacctatgattctgatgaggaagatgatttcttgacttaagtatggtgggtccatcttctcttggctgtgcggatggcagtcttggtggtcaactgtacaggataagggccttcccaggcgggcacaagtttcccttctttttaccctctgatgagaacatggtccctgggttagtgctggtgagctagaaattctagcggtggtgtctgtgctaagagatcttttatcttaagagaagaaaaggtagcggagagaccaagtatataatttctgaggaactgatccttagtttcaaacataggaacattagctgaggaatgtaaataaggcaatccatataacattttatatggagacaggcctgtatccttttggggagctgtcctgatccttaataaggcaatgggaagacatttggtccatggtaaatgagtttctagaattaatttagtcagatgattcttaagggtttgatttattctttctacttgtccggaggataagggatgccagggaatatgatattcccattttatgtctagcacttgggccagctttttaataatatgtgcagcaaaatgggtttcattgtttgagtcaatattttctattattccaaacttgggtataatatgctcaattaatggttttaccacattattggcagttgcctcgaaaaggggatggcttctacccagtggttaaggtaattaattattactagcaggtgttttagccgactaatgggtggcattttagtataatcgacttggacgttttggaatggtcttaactccggagttcttcctccgaaaggcaatttcctttcagcttgtttgtcagctttcttacagatgagacagccatttgtgatctgcctgtctagaatataaatgccaatacacctaaagactctgagaatcatgtcacatagggcctggggaccccagtgagtcccttgatgtaaatgggataatacttccctcataaagggtttagatagcatctctctttgatctggaagtatgcagctttcttatgaatttttttttttttttgctttgggatttcaactaatttttctttcccagccagggagaagataggcacaacagtaggagaaggaaggtggggagttaaatgaaaaatgggcatatctaagactgcagcctttttggccatctgatctgcaaggttattccttcggctcttaagggaaaaatcatgttgatgtccaggaatgtgcatgatggctatctactttagtagctggagattatctaagacatgactaatgacttatgagcaagttcttggcccctactatttataagaccttgttcagcctaaatcttcccaaatgtgtgtgctaccctaaaggcatacttagaatctgtgtagatagtttctatctgatcctttaaatattttaaggcctgactgaaggcaaataatttacaagcttgagcagaatagctattgggtaaccatcctgatttaatttcttcgagtgtctctctatctactactgcatatccactgtgttattccccattaaacacccagggggacttgtctatgaataggtgttgccccgatctatagaggcctcagctaaatctggctggacttttgtatggtagtcaattaagttgaggcacaagtgttctgtctgtagcaacggatttcccgtcaagaaccctgcagggttgagtgagttatctgttgttatggttaagtcatttaaatcatccttttttttttaacagaatagccttatattttaaaattctggaatcagtgggccagcttcctgctttttggctcaaaatggtcttgacttgatgagatgtgctcacggtcaaataccccccaaaggttatttttctacttttttctactaatatggctgtggttgcaatagattgaatatactggggccacccactggcaacaggatttaaaatcttagacagaaaagctactggttgtcaccggcctccgtgttcttgagtgagcacccctaaggctactccattgcttacattaacaaaaaggtggaagggcttcttaagagaaggcagagctaaaactggagcagacattagtctatgcttcagtttattaatttgatctacttctttagaggaccacataagggggtcaggccccttattagctaacttttcatataataatttacttcttaatgcataggagtcgatccataatcggcagtatctaattaatcctacaaactttttaagttcttgtttgatccagggcagtggcagggacagaattccttctactcgctcaggaccaattcttcttttgctggtgctaaatggcccatgtatttgacttctggttctacatattggagcttctcttttgagactcgtagcccttcagtgtataaatgatttagaaaatagatggtgtacttatttactttctctatatcctctccaggtataagaatatcatccatgtgttaagtaaacatagctgttttgggatagcagccctctctatgactttctctaaggcatgactaaaagggtttggtgaatctgcaaacccttgatacagaactgtccatctgtattgttgcttctgcccactgtgggggtcctcccactcaaaggcaaacaggtcaggctgttttccactaaaagacatgcccagaagtcatcctctaaatttaagacagtgaactactgattactatatggaattttacttagaatagtgtagggatgggccaggcgcaatggctcatgcctgtaatcccagcactttgggaggccgaggcgggcagatcatgaggtcaagagattgagaacatcctggccacttggtgaaaccccgtctctactaaaaatacaaaaattagctgggcatggtggtgggtgcctgtaatcccagctattcaggaggctgaggcaggagaatcactggaacctgggaggcggaggttgcagtgagccaagattgcaccactacactccagcctggtgacacagtgagactctgtctcaaaataagaaaagaatagtgtagggatttggcatgattgggtgaggagtctgcactatttcattaacagctttaagatcttgcactaatcagtatgacctgttaggtttcttgacaggtaaaatgggagtattatagggagacatgcaaggcttgaggagcccatcttttgtaagtctattacgggcttcaaccctatctgcccttccaaggagataggatactatttattccttacaatctcccctggagtcttcaattttatttggattgggggaatctgtaacctccttcagtttctttcttttggccagacaccaggggaaattttgccatagttagcaaatttagtgaggttaagaaccctcttgggctaacctgttaagggaagagaccacccctcatattgtcttatgcccaatttctacttccaaaagaaagaagaagtaaaaactaaaaggcagaaatgaaatccacaggcagacagcccggcaccgcgccctgggcctggtagttaaagatcgacccctgacctaacaggttatgttatctatagattccagacattgtatggaaaagcattataaaaatccctgtcctgttctgttctgttctgattaccgctgcatgcagcccccagtcacataccccctgcttgctcaatcaatcatgagcctctcacacggacccccttggagttgtgagcccttaaaagggacagaaattgctcactcagggagctcggctcttgagaaaggagtcttgccgatgctcccggccgaataaaccccttccttctttaactaggtgtctgagaagttttgtctgctgctcatcctgctacgctgtagaccaatacctaattttaacattaaatctctccgaagtagattagtttctgctttaggaattaataggaattgaatgttacttgatcaggctttatattttaccttggcactttctaaaatctttgctttaaatccttccccttttactccagagactaacaactcctctggagaatatgttagcccagttggggtaacacatagggaggagcaagtagagcctcagtcgactaagaaagtaattgactcatggttaggtcctacctttaaatttatcaagggctcctggtgggactcgaggtagaaaagaaagagcccctgacaccccccattcctcctctttaaaggcaggaatgagcggaggagctccccctgtaatctgtcacttagggcattatctcttaaagtggcctgagtttccacatttgtaacatctatcttgccctccttttctccctattccggaacttccctgcctctgtcctttttcttctctcttatgtttacaccctttacaacacttgctgtgactgttttcccttcaaccttgattctgtcttctgttttgcatccccaggtcccagggtgtcggccgaaattttgcttctggcattgattgccctggtgaattttgccaaaagatttttgccttttgcttttctttttttcatttcatctctcctgacatatactttctgtgcttcctctaaaagctctttgatggagcgattttttcatctttttattttttgtaacttctttgctatattatgctatttgtgacaaaatgcaattttagcatcccttgtcctggggggctatctagatctaaattagcatactttctcatttgctctcttaatctgtttagaaattgcacaggcccttcatgtttttcttgttgtacatcaaaggccttagtaagattttgaggtcagggtgctgattctttaatccctctaaccgttaattctcgtaaatttttatatggtcttggtgggttgcattattattatcccactgtgggtcttgagtgggaaatttagtatttgccaccggattatcctggcgagcagggtgatcaccttcccaggctgccatagcggctgcgtggattatgtttcgcttctcttttgagaagaggatacctaggatcgacattaactccgtccaggtatactactggggacctaaaaactggtcgatctgttctgccactccttttggatcatctagcaggggcttgagctccctctttaggcctcagacctcagaggcagttaagggagcatttataaagccaatcgtgccctctccttgtggaactttttttagagggaagagctgggaagtcgattctttaggagtgcaaggaaaaggaagattctgaatgtcccttttacattgttctatctctttttggagccctctttttgaggaaggacatttagatgggcagcagagatgatcaagccactgaggcggtaattcctcgggaacagacgcctccaagtccagagtgatccctggagcgggtgggggggacgagacttccgcctgaggaggaggggaggcgggacttctgccggaggaggagtgggaggcgggagttccatctgaggaggagaaggcggcagccatacggcaggcagcagcagcgccgtgggattcagaaacgggaagataatttaaaggatcccactaactgctctgggcctttgtttctgtctgttaccgtctttaagtcatttaaggggtaaagaagggcaggcccttgctgctagcataaggcataatccattttttctggggacatggggctttggttgttaacatacattattaaaagttgacagacccaatcctcatctgaaccaaattttggccagaaaatggcaggttttaaggttggctcttgggtccagaggaaacagcaatatttaatcatctgttgttttctcttatatttagtccgctcatcctctttccaatattatagcatgaatcctaagggactatcaaaggaaatttgatcactgtcccctcccttgttgcctggtctatttcctgtcccaatcctactagaagcatttcccatgttgaatcccagataggcccaatcccttgtgctagggatgttttgcctcttcctttcccaggaaggctgaatcccccagataccggggatgtctcgtctgtcctgtcctcaaggcttaatctctcacaccagaggtgtttcaccgattctctttccctgcgaggttaaccttcctccgtttcccttttggaggttccttacactcttcccgtttatgtccacgcactctgtccagcaacaagttggtaatcgtgcacacacactcagcctcccaaaagctgaccaccaaggaagtactttgctgccctcttgcggcttttcctaccttggcccatgcacggcgttgcctggttactgtggggagtcccgcaagcctgtctctttccccgcgttgctgagaattcaagtatattcctctcaccgggtaggtcccggctctcctcctggggctgccgcaacgggcggcagggcgcctccccacaagacagggccaaagactgtcccagaggggaatgttaatctcgctggggccttcaaattgttggtaacgggtgctcggtgtcataaagatcagcactgaggcacagcatctctcagcaaggctagtttactttctgcagaaaaagtgccgctcgccagcagtcttgccatgaatgcacacacgaacaaaggagacaaggtcatttataacctgatgcatccaccctactgctgtgtgcggcttccaatggctggaacaggacctcacaatttgtacttgactcaaactactacaagtcaaatacagcaaaaatccaaaaacccgaatttaaaagtgaacaaaagactaaaatacttcccaaaggaagacacacacattgccagtgaggacatgcgaggattctcaacatcactaatacttacggatatgcaaatcaaaaccacagtaatacaccacctcacacacattaaaatggctttaataaaaacaacaacaacatgaaaccacaagtgttttcaagtaggtggaaaaattagggctctagtgcattgctgctggtgatgggaaatgttatagatgctgtggaaagtggtatggcagtttctcaataaattaaagaattactacttgatccagcaattctacttctggattctaggttgtgaatgcgttgattatctttagtgaactatagaaagttttctttatctggtgaaaatacactgtaacataataacttagtagataacatgagccctcttgcatgggagagcttttatacaaccagaaccagaaaatatgcattgaaaataacaattgaatgaaatctcattataaaatgtttaaatggaccagcaggtgaccaagtgtacctgaagctttgattgttttcccaggaatatggggccaaacattggttataaattcttttaacaatttataagtcaccacaccaatatattccatttgaatatttttatcttttccatgatgagtcatggaatgcagaacttttaataataaaagctttaaggacttaggaaggacaaggtggccatcctggttctccatgagtccatgcttaattaatattagactcatatcctcttgaatcatagtttttcttcaaattatgtgcatagcactgataactgatgggttatcataggtaatttgacttagaccatgacgttcattcaaattgtatatctaagtaattttaatgtcagctgatgtagcatgagtgctgattggttaggtaggagatgaaatcatgggaagttgaagctgtccttttttgctgagtcagttcctgagtagaggtcacaagatcaaatgacccattttatcgatctgggtggggccagctcatccatccatcaagtgcagggtctgccaaatagctcagacagatctcaggagcagtttagagagggtcagaatcttgtagcctccagctgcatgactcttaaaccgtaatttctaatcttgtggctaatttgttagtcccacaaaggcagtcttgtccccaggcaagaaggaggttcgttttgggaaagggctgttatcgtctttgttttaaactgtaaactaaattcctattaaagttagttcagcctatgcccaggaccgaacaaggacagcttggaggttagaagcaagacggtgttcattaggttaggttagatctctttcactgtctcagtcataattttgccaagatagtttgaggagaatcaaattttaaagaaagacacataatagtgtcacggctagccttaaatattctcttgactaacttacagagcaaaaatctagccttaaacaaagttaagttttttgtaatctcaaatgacttgctttagatctcctgaggcaataaggattaaagccacttcaccatgtcatccagtagttaaaattccacactttcactgttgcagcctggattcaattacaagtcagagaatgaaccgcttttgttacaggaaaaaggtcccaatccatgcccaaagagaggattcttggatcttgcacgagaaagaattcagggcaagtctgcagcgcaaagtaaaagcaagtttattaagaaagtaaagtagtgaaagtacagctactccatagtcacagtaggatgttcttgaaagtaagaggaggcacacacccaccctaggtacagtgctcatatatatggggagatgtaccctgctacaaaggtttgtgataaggattaattttcttaattgtgatattttgcaagaatctaagttattatctttaaagcaaaattaggaatcactttgttttccagatattgggatatctggacactcccaagtctgggtctgtttagtaaatattattgatttgttcccttaaccataaacatctagaggctaggaatgcctcactttctggaaatgcagcccaacaagtcccagcctcattttcccagccctcactcaagatggagtcactctacttcaaatgcctctgccacttttgttttgatatttgtgtgatttttgagtttttgtggtactcatttacatctttggagatgtctcatgcatccttggctaagtcacaattatggttagtgcttatcagtttcagctgggaggatacttttggttaaaaaaaaattcaaaagccagaaatatcagctgtttgtcctagctaaaatctgataataaaaaatctgaaagtattacagtgggtagctagtcagacatcagcaggacaggagggagcctccttcccccacacaccaggaatgtcatgaccatcaggtgattgtcaggtggtcgttaactgtctctctaaaataataatgggttgtagctagcaccagggaaaggcagtctcccaatagacaggaaacacctgaaacagttgatcagctccttcctgataagttctcagaagttgggtgagtgggctaaaacatgtgcattaagaggcaaaatggtggagtttaactggtttgtgacctcccagggacatttgactggaaagagaagaacacctcaagtgagcatgcatacaactccagtaaatacactgcgcatgttcaccccaccccaagtgctagcaggccactgcacatgcagacagcccactccaaagggaaaataaggggagaggagatgcagaccccagaattatgccaacatacaaaagcctaagtcagaggtcaagcaatgcacttgatctcttgttgcctgcttggcttttttatttttttatttttatttatttatttttttgcaacagagtcttgctctgtcacccaggctagagtgcagtggcatgatctcagatcactgcaaccttcgcctcccaggttcaaatgatcctcccgcctcagcctccctagtagctgggactacaggcacatgctaccacacccagctaatttttgtatttttggtagagacgaaatttcaccatgttggccaggttggtctcaaactcctgacctcaggtgatctacccatctcggcctcccaaagtgctaggattacaagtgtgagtcactgtatccagcctgcttgactctcttttaattgtactttacttcctttaattcctgccttaaagcttttaaataaacttttactcctgctctaacacttacctcagtcccttcttctgccttatgcctcttagtcaaattacttcttctaaagaggcaagaattgaggttgctgaagacgtctacagattcactgctgctaacatgctttggtgtcatttctcagctatgtttggcagctaagagaaggatttcccaaaacagctctgtgattaagagtcagcttaattaaaaactggtatttaagccatatatttattaatggtatttaagccatataattattaatatttataatattaagccatgtatatattaaaataatatatatataaaatattatatatatatagaatatgtatatacacagaatatataaattcatattggatatatattgagaaaggacttgaatgtatattgaaggcttttctgcttttctcttttgtatctttttttttttttgagacaggctgtcactctgtcacccaggcttaagtgcagtggcacaatctcagctcgctgcaacctccacctcctgggttcaagggattcttgggcctcagcctcttgagcagctgagattacaggcacgtgccaccacacctgactgatttttgtatttttactagagactgggtttcgccatgttgctggtcttgaactcctggccttgagtaatctgcccgcctcagtctcccaaagtgctgccattacagatgtgagccactgcctctggccatctcttttgtatctttgaaagattttttttcagttgactgaaatctttttaaatcatgtgcttagtctgtctggtttttttcttaaaaattctttttctgcttatttctctttccatccttcctcttgctattcttgatgccacatgagggaacctaaagaatttctgacagcctggaaccccttaaggaaaacagaaaagatgccacagacttccctatttaggagaaaccactgtttttcctcatggaaccccaagagttgtaagtaaatggattcctctcaggtctaaaactctgctctcttttccattttccctgacctctttggcttttgggggcatcagagattactttgcactgtaaaaatgcttgaccttatatgtgtgatggctgctgggtcactggtaagagctttggttttggaggtgactaacagcgctcgcaataaatgattattacttcagaatgctactcatttctttgcaagtttagataagaaatacacagtttaaataattagaaaaatgcccttatagcaaagtacactgtggaagtgttgcatagtatggttccattggcattttcctcttctcagggacctgggattcagtgaaatccttgatttataaaggtctggatgctgtcccttgcaactgggtcttctttttatgtatttaaattattaggatctaaaagttgcaagacttcgttggtcctcttccttaatgggctctgtcctgagctcagtggtccagttggaaaacagagaccaaattaaaagctgcctatctaaataaaattggtctccttataaaatcctatggtaaatttctgtcatttttgtgttaccttggcatctatttttaatcttccttgaacacacacaaattccttcttgtaaaagctttagttctctttctctctgtgctttgagatgtaaatttgctaccaattttctctaaaactcaataaagtctggcttaattaaatgttaacctcttccatttacaaaggcacaaatttaatccaactgtcttttttaaatactgaatttgatcggtcctatgctgaaatcaaaactctaaactctttctgcctccctctatctttatgtgcacatgtgtatgttatatgctgtatcacatatatgtctatgtccatacatatgattatatgttgtttacatacatggtatcaaattaatgtaaaaataagtactcataaattaagtaaataatcccaaatgcttttcaatacatgtgattttagtaatctttggtaaataaagatagtttaaaaattattggtaaaatgaagtagaaatgtcttcagatttaatttagacatttgtgcctgggtctgttggcagacatttttatattgtatttactagatgttttagggtcatcatatggttgcttctgtatatatacattttcttaatttttctgtgaccttatatctttagatttgagcctttagattctgagttctagatgagcgaccatagcaagaactggggacaaaactcatcccatcccacagctgtgccttttggccatgctggaagagattagattctccaggtataatcttcatagctttgctgtttatcttgggctttacacctggtaactagttagaattgcttacttcctgttttttctctcctgaaaataatgctgtatttgtttgttctcacattgctactgagaaatacctgagactgggtaatttataaagaaaagaggttgaattggctcatggtttggcatgactctcacatttgctcagcttttgaggaggcctcgggaaacttacaatcattgtggaaggccaaggcagaacaaggcatctcacaggtgagagcaggaggaagacagcaagggttacacactcttaaccagatcacctgagaactcactgtcactaggaaagcaccaagaggaatggtgttaaaccatgagaaaccatccccataatccaatcaccttcaaccaggctccacctacaactttggagattacaacttgacatgagatttgagtgggaatataaatccaaaacatatcattctttccctggtttctctcaaatctcatgtctttcttttcatacgtgtccgtgtgaagagaccaccaaacaggctttgtgtgagcaacatggttgtttatttcacctgggtgcaggtgggctgagtccgaaaagagagtcagcaaagggagatagggatggggccattttataggatttgggaaggtaatggaaaattacagtcaaagggggttgttctctggtgggcaggggcgggggtcacaaggtgctcagtgggggagcttctgagccaggagaaggaaattcacagggttaatcactcagttaaggtggggcaggaacaaatcacaatggtggaatgtcatcagttaaggcggggcagggccttttcacttcttttgtgattcttcagtaacttcaggccatctgggcgtatacgtgcaagtcacaggggatgcgatggcttggcttgggctcagaggactgacattcctgccttcttatattaataagaaaaataaaacaaaatagtgttgaagtgttggggtggcgaaaatttttggggggtggtatggagagagaatgggcgatgtttctcagggctgcttcaagcgggattaggggcgggtgggaacctagagtgggagagattaagctgaaaggagatcttgtggtaaggggtgatattgtggggttgttagaagaaacatttgtcatatagtatgattggtgatggcctggatacagttttgtgtgaattgaaaaactaaatggaataagaaggagaaaaacaggtataaaaggtctaagaattgggaggacctaggacatctgattagagagtgcctaaggagattcagcatagtcctgccagcaaagattatttatttacttcaagagttaagagtggcagtttggggatagcacgaggagatatcagctgtgatggcttggagaaacagtgtaaactggcagtgtgaacaagagcagggcatgtgtgagtagttgagaatggagaataggaatatgactagacagaaaatagtagggatgacaagttttcttgggggcacagtctaagttggtccagtgtctggaatgagactggggcctaataaaaaggagcatctatacaggagcttaaatgggctgtaccttgtagcattctgaggacaggcctgaattctgagaagtgaaagtggtaaaagtattgtccagtcctttttaagttggtggctgagcttggtgaggtgtgtttttaaaagacctttagtccgttctacttttcttgaagacggaggaccgtaagggatataaaggtttcactgaatactaagagcctgaaaaactaattggctgatttgactaataaaggctggtctgctatcagactgtatagaggtgggaaggctaaactgaggaattatgtctgacagaagggaagaaatgactgtggtggccttctcagaccctgtaggaaaggcctttacttattcagtgaaagtgtctatttagactaagaggtattttagtttcctgactcgggcatgttgagtaaagctaatttgccagtcctgggtgggggcaaattctcgagcttgatgtgtagggaagggagggggcctgaataatccctgaggagtagtagaatagcagatggaacactgagaagttattttcttgaggatagatttccacgatggaaaggaaatgagaggttctgagaggcaggctagtggcttgtactatagcatagcctgcatttgctggtatgtggcgattaggcctggtggaactgccatcaataaatcaagcgtgatcagggtgaggaataggaaagaaggaaatacagggaaatggggtgaatagcaggtggatcagagagatacagtcatgggggtcaggtgtggtatcaggaataatgtgggaggccagattgaagtccgggccaggaacagtggtaattgtgggacttaacaaagagtgagtacagctgaaggagccggggagcagaaagtgtatgcgtcaggtatgaggaagaaaatagattttggaagttgagaaatgtagagagtgagttgagcatagtttgtgattttcagggcctctaaaagtattaaagcagcggcagccgctgcacacagacatgagggctaggctaaaacagtaaggtcaagttgtttggacagaaaggctacagggtgcggtcctggctcttgtgtaagaattctgaccacactaaccatgcctaggaaggaaaggagttgttgttttgtaagggattgaggtttgggagattaatcagacatgatcagcagggaaagcacgtgtgtttttgtgagaattataccgagataggtaacagatgaggatgaaatttgggcttgactgaggtaatgggggctgtctgtgaagccttgcggcaggacagcccaggtaatttgctgagcctgatgggtgtcagggtcagtctaagtgaaagcaaagagaggcggggacgaggggtgcaggggaacagtgaaaaaagcatctttacgatcaagcacggaatagtgagttgtggaggaaggtattgaggacaaaagagtgttcgggttgggcaccacaagggggataggcaaaacaatttggttgataaggcacagatcctgaactaacttgtaagtcttgtctggttttaggacaggtaaaatgggggaattgtaaggagagtttataggctttaaaaggccatgctgtagcaggcgagtgataacaggctttaatccttttaaagcgtgctgtgggatgggatattggcgttgagtggggtaagggtgattaggttttaatgagatggtaaggggtgcatgatcagtcgccaaggagggagtagaggtgtcttatacttgtgggttaaggtggggggatacaagaggaggacgcaaaggaggctttggattgggaagaagggcggcaatgagatatagctgtagtccaggaatagtcagggaagcagataatttacttaaagtgcctcagcctaataagggaactgggcaggtggggataactaaaaaggagtgcttaaaagagtagtgtctaagttggcgccagagttggggagttttaagaggtttagaagcctggctgtcaatacccacaacagttatggaggcaagggaaacaggcccttgaaaagaaggtaatgtggagtgggtagcctccgtattgattaagaaggggatggacttaccctccaccgtgagagttacctaaagctcggcgtccgtgatggtctacggggcttctgaggtgatcaggcagcgtcagtcttcagccggtaagccaagaaggagtcagtcagagagccttgggcccagagttccttgggctctgggagtggctgccaggtgagttgaacagtccgattttcagtggggtcccacacagatgggacgcggcttaggaggaatcccaggctgcgggcattccttggcccagtggccagatttccggcacgtgtagcaagcgcctgggggaggaggttctggaggaacgcctggttgctatggttcaggcgtttggaagttcttgtgtgctggagatgtggctggggtttgtctcacagtggaggcaaggaattgcaacttttttctgttattgcacaccttgaaggtgaggttaattaagtcctgttgtggggtttgagggccagattccaatttctggagttttatttaatgtcgggagcagattgggtaataaaatgtatattgagaataagatggccttttgaccttttagggtctagggctataaagcgtctcagggttgctgtcaaacgagccatgaactgggctggatttttatacttgatgaaaaagagcctaaacgctatctgatttgggataaagaaaaaggagcattaaccttgactatgcctttagctccagccacctttttaagagtaaattgctaggcaggtggggaagggctagtcacggaacgaaactgtaagccggaccaggtgtgaggaggggaggcaataaaaagattacagggtggaggagcggaggctgaggaagaattgggacctagcttggcctggcaaggaggggagaggtcagatgggtctgtagaaaaggaagattagaaagactcagcgacgcttggggttgggactgaggggacaggcgggagatttgggacgagttgcactgggcacagagactaggaagggactgatgtgtaaaagaatgcctggacgtcaggcacctcagaccatttgcccattttacgacaagaattatttagatcttataggatggaaaaattgaaagtgccgttttctggctatttggaactactgtccagtttgtattggggtcaagcggcattgcagaagaaaatgagatgcttagattttaggtcaggtgagaattgaagaggttttaagttcttaagaatacaggctaaggaagaagaaggaggaatggaaggtggaagcttgcccatagtgaaggaggcaagcccagagaaaagagtagagacatggagaaggggtgggggtttcttgcccaccagaaaagcagagaaagggtcggagcatggaaataagggattggggtgcagacataagaggttggggcatggaagtaagggattggggcacagagataacaggttggggcgcggaaataagcaattggggcacagagataagaggttggggcatggaaataagcgattggggcgcagagataagaggttggggcatggaaataagcgattggggggttcttgccccctaggaaagcgggacttaccgctaagggtgaaggagaaggggttgagtggtacttgcccctgccccaggaaagcagagaaggggtggagagaaggagagaaggggttggggtacttgccccacccccggaaaagcagagaaggggtagagacaaggagagaagggttggggtacttgccccttccccagaaaagcagagaaggggtagagacaaggagagaaggggttggggtacttgccccttccccagaaaagcgggacttgccgctaagggtgaaggaccaagacaggcgtccctgcgtggtctgacacctttgaaacgtgggtgaataatcagagaggcgtccctgcaatgattaaacaccaagggaaagctgccttcccagtctgtgaccggcgccggagttttgggtccacggataaaacatgtctcctttgtctctcccagaaaatgaaaggaattgaaattaagagaagggagagattgaagagtggaaaggagaaagtggttgagggacagtgagagaggttggagaagagagtaagaagagaccgcttacctgatttaaaattggtgagatgttccttgggctggtcggtctgaggacctgaggttgtaggtggatctttctcacggagcaaagaacaggaggacaggggattgatctcccaagggaggtcccccgatccgagtcatggcaccaaatttcatgcgcgtccatgtgaagagaccaccaaacaggctttgtgtgagcaacatggttgtttatttcacctgggtgcaggtgggctgagtccgaaaagagagtcagcaaagggagataggggtggggccgttttgtaggatttgggaaggtaatggaaaattacagtcaaagggggttgttctctggtgggcaggggcgggggtcacaaggtgctcagtgggggagcttctgagccaggaaaaggaaattcacagggttaatcactcagttaaggtggggcaagaacaaatcacaatggtggaatgtcatcagataaggcggggcagggccttttcacttcttttgtgattcttcagttacttcaggccatctgggcatatacatgcaagtcacaggggatgcgatggcttggcttgggctcagaggcctgacatttctcacatttcaaaatgtaacaatggttttccaacagtccattacctctttccagcattaccagtaaagtccaaagtcccaagtctcttctgagacaaggcaagtcccttttgcccatgagcctgtgaaatcagaaacaagttatttacttccaagatacaatggggatttaggcattgggtaaatactccaattccaaaaggtagaaataagccaaaagaaataagatacaggccccatgcaagtctgacacccagcagcacagtctttaaaactaaagctccaaaataatctcctttgaccccatatctcacatttagggcacactgatgcaagggttagactcccaaggccctgagaagctctactcctgtggctttgcagggctcaaccctcatggctactctcatgggccggcattgcgtgcctatggcttttccaggtgcagtgtgcaagctgccagtggctcttccattccagggtcttgaggatggtgggtatcttctcccagctcctggcccagtgaaaactgtgtggagacacttaccccacattttgcttctatactgccctagtagaggttcttcatgagggcactgcccttgtagcaggcttctgcctggacattcaggcttttctatatatcctctgaaatgtaggctcccaagcctaaactgttgcactttgtgcacctgcagggttaccaccacatggaagctgccaagctttatgacatgtaccttctgaagcaacaggccgagctgtaccttgacccttttgagccatgactagagcagctgggatgcagtgagcagtgtcctgaggctgcacagggcagcagagccctgggcctggcccaaaatttattctgtcctcctaggcctctggtcctgtgatgggaagggctgctgcaaaggtctctgaaatgcctttaaggccttctccttattgttttggctattagcacttcgctccctttacttatgcaaatttctgcagcctgcttgaattcctcccctgaacatgggcttttcttttctaccacatgctttcctacacactttcagaaaactggatctcatgagaactcactatcataatgacagcaccaaggaagatggtgttaaaccatgagaaacattagtttatttgccaatgtctgaggtaggcaggtgaggacagcgtttgtgctgttgtggaaatgtgttctgaacagggaccttgaagtgaggtggaggaggtggccaagggagagaacactcaggaccccagatggctgctgctgcccaggacatccccgcctcttatggatgttacccagattgtagcagggagaggcttcctttaagtagagagtaaacggactaagaaagcgatagatggctccacatgccaagaatgttcttttccttttctctcccttttctccctctccttttcttttcatgatatcaaatgccagagaggcgtgcagagcacgtagggggccttccttgcgttgctgctacccaagcctgcctgggctgtaagttcccccggagcacccctttgcccccacctgtggcatggtcggcctctcttgggcccaagcctaccctctgcttcctcagagcgggtctcagaccaggcagggggtttcccaggagtccctgggaaggtttgttttctgcagtgccatggtgacataaatggttgctttccttatcatttttcaatatttagtggccactgattactgccttagaaacacggagcaattgaggttttcctgcccctttccaattccagttcaatgtaattttcctgctgtgactcctgtccctctctgatgtcctctcccctattcaggcttcaacagaagccttctatcccctctcaaagctccgtcctccccaggagacaccagccagtctctgtgcttcctcctcccaccctctcccagggagtcctccctcacctgtgagcaggagcccctgccaggggatgcatcctctgcggggaggggctgaggggggcctcatggtctctgctgcctgcttctcttctgtggagaggagcttagctccaggatgatcagagctactgtgactgccagttctgctgtctttcctccctctgtgctgagccttctctcagggcaggagcacttcctagggccaggggcaggggcgggactctgcccaggatgcttctctgtcccctcccctctcagtcctgccttctggttcctgcttccccttcccttctgtgtgtgtttggtccttaggacctgctgaggccatttgccttcttcagatatggctctccttccacacttgtccacacacacacacatatacacacacagagacacacacagagacacacacagagatgcacacacacatacacacagacatgacacaaacacagacacacatatatacagacatacaggcaaacacatatacacatatatacagacatagaggcaaacactcacatatacagacacacacacatatatactcagattcattgaaactgagacacatgtacacatacagatacacagagctgtcacaggacaaactagcacagataaagacttcaagtggctttatttgccgtcctaaaatcgggcgagacttcatcccatgagacaatacgtgggtcaaggagctgagcagaagcgcgggtttaatagagaggggagggctgcggaaagcaaacacaaaaaacagggccactcgggaaaggctcatggaacaagggagaaatctctgatgggggagaatcaggttcctgttttagaaacggtgagagcagaggggaggtcattgtcatgcgattgaaactggcctgtttgggaaatcggctattatctttcgaaggtcaggtagcagctcagttttcctttggtgacctgtgacattggggaaggactgcattgtgctgttggtctggtctgttggggcctggagcaggagctcagccactgccatggcctcctctgactgctgtttagcaaagctctcaggtggggctgatggcgctgtcctggggaggccctttcagtagcaaggctggtgcaaccctgtcccctgggaggatgacccgccctccccagggctgacctctgctatctcctggcctcaggtctgtcagctccacacacagaaccctggggatccaaacctggggaattctttctttgtgatgcagaaacccagctggccaggtctccccatgctctttagtgcttgggaaggtgggatgatgcccagcaggaaggtgacagaggtggctctgggggatagaaaggagctcactgggggatgactggggagggaccagccctctgtctccagtgtcaccagcctggcctctgacccaaagagacccaggctggactcaggtggagctccagctccagggtgtggaggaagttgtcctgtgtgtcctgggtagagaggactgtggtggagggaggtgggtggctctgagccctgctgtccttggggaaggcttcatggagaccctccctttctgtgtctgttggctgagctgtggctcagggcctgtccatgttctccctatgttcaccccttaaccttgcaggtggttgggggggcgagagagatagaaagactgtgtctgtctgtgtgtgtgtgtgtgtgtgtgtgtgtgtgtgtgtgtgtcctgtggctaccacaccttccccatgggtgatgccaggaggaagtggggagctgcacaaaaacccttggcagagcaggcaccatgaaggagcaggcacatggcagggaccagaagggtcatttggggcaagggctggaaaccaggctccacctctacctccttagcaaagccaggttcctgtccaggggaatccatttcctgagtgttatctgtgtgtgatgtcgccccctggagggcaagaggagacttgtggccttgtcaggggctgccccagggacactgaccagggtctgcatggtatgagctggccctgacccctgggcagaagtgggatctgacctccagactgcagggtcaggtcaccccaggtcctgttcactgcaggtccccaggctgcccaactccatgcagtgcaagatgagcccagggagaggacaggagttatccagagaacagcaggtcgagattcaagagaactgtccaccaggaggatgggctgccttagaaggagccacctgtccccaaggtttcaaaggaagggctcagggaggtatctctgggggctttagagagaggatgccagcctgggaggtaggtggtccccagaatgccctgtgttcctccatcacagcactgggggtgctgcctccaggtcaactgtgtccctgtctgatgcccactgtcactgctgttactcaatattgtactggaggcattggccaatgaaattggggtacagatacgaatagagatataagacttagaaagagggagaataagctataccaattcacaaccaatatgtgattatatatctaggaaattccagacatagtgaaaaactaatcaatgcaagaatttaatagaaagatgtaaagttaacataaggaggttaataacttttatacacagaaacaatactcagatagaaggtgtaatataagacctcttttattatgacaatataaagataaaacacctgggcatacccttaacaagaaatttgtaaaacctatacgagaaaactcttaaaacactcctaaaggacacaaaattcatcttcaaaagatgaagagacacatttagtttcttttcgatcactttattatgaaaatgttcaagcacacaaacaaattgaaaaagttgtacagccaacacttacatactcatcatgtagattctgtaattgttaatattttgtagtatttgcttgattaaatattcttacatccatgaaaataaatccatcctattttttcatgtatgtcagagtgagttgcggatctcagtacccttaggccctaaataccccagcactaacgtcattaactagagtttaatatttgtttctatcttaggtgaaatttacataaagtaaaatgcacaaagttgtagtgtaccttttgatgagttttgacaaataagtgcatacacccatgcaaccccttccaagacacacacagttcctgttgccccagtgagttccttcccagccaatcctcatgcccagtcccacctccagaggcaaccatcgtgctgagttttcatcataaattaatgttgtctgtagaagaattccatataaatagaatcatacaatgtgtacgttttcctgtgggttaaattttcttttgctcagcaaaatgtttttgagaatgaagtattttgttgcctctatcagtagtttattactttttttttttttgagacagagtctcgctctgtcgcctaggctggagtgcagtggcatgatctctgctcactgcaagctccgcctcccgggttcatgccattctcctgcctcagcctcccaagtagctgggaccacaagcgcccgccaccacacctggataaatttttttttttaaatatttttagtagagatgggatttcaccttgttagccaggatggtctcaatctcctgacctcgtgatccacccgcctcggcctgccaaagtgctgggattacaggcatgagccaccgggcccggccttgtttattactttttatagcaacataatattcagcagtgtgaatataccacatctggcttattcatcctcctattgatgggtattttgttttaatatttcctcagttttggaccattattattatgaataaatctgcttttaaaaataactttgtgtatgttttggatgggcacagtagctcatgcctgtaatcccagcactttgggaggccaaggaggcactgatcccttaaggccaagagttcaagaccagcctgggagacatgatgaaatctcatctctacaaaataataataataaaacaaaataacatctttgtatgtgtcttgttatgatcacatgtttcattcattttgggtaaaatacctaggaatgaaattgctgggttatggagtaggtatatgtttacttgtataagaaagggacagacttttcccaaagtggttgcatcattttacattctcaacaacagtatatgagagttctggttgctccatatatcctcatcaacatttggggtcttgtctttctactttcaggaatttggttggtgggttgcaacatttgattgtgattttaatttgcatttccctgatgactgatgatgttgagtagtttttttctgtgcatattagctattcgtatatcttattttgtgaagtttctgtgaaaatcttttagtcattattgcattcagaacaaaggattaaaaaaatgcatcgcttgaacccccgaggcagagtttgcagtgagccaagatcgtgccactgcactccagcctgggcgacagagtgagactccatctcaaaaaacaaaaacaaacaaacaaacaaaaaaaagcatgtggaactttagcatgagttgacttcactttgggcatgctgtctttagcagtcacaaaaaaatgaataggcgggtgaactattgtagaatgtaagagatataataaccaaatataaggcataagtcttgattggattccagttttaaaaatacacatggatagccaggcgtggtggcacacacctatagtcccagctactctaaagactgaggcaggaagatcagttgagcctgggaggtggaggttgcagtaagctgagatcctgtcactgcactccagcctggatgacagaacaagattctgtctcaaaataaattaaataaataaatacagatggaaaaatcattttggagaccaaaggggaagactgaaaaaggactatatattagatagggttagggagttattgtttattttctcaggtgtgatcatgggattgtgggccagtcactctggggagaggcacgctaaagcactcaaggacatagtgtcactcaaggacacagtgccttgatgcctgcaatttactctgacacagttcagaaaaaaacgaggaaatatggcaaaatgttaaacttgaatataaggagaggatgcgggtattcttggtattattttttccgcttttctggatgtttgaaattttcataataaaaagttgaaaacaaaggatgatgtgtaagaaagtaacttggtggcatcagaggtcatggatggtggcattggtgcaaagacatcaaggatgggaagggtctagttatacaaagagtagatgaaagacaccccaggcacaggaacagcaagtgcaaaggccctgaggtaggaactagccagcatcacattgtcagccctgcgagtgaccttcctagaaagcagacccttcaggcccagtaaagctgcagatgactgcaccctgactggcttctttactccaacctcatgagactcaccaagtcacaatcacccagcttcataataaaaagctgaaaacaaacactcttcaattcctgccccacagaatttgagaggtaacaaatatctgttgctgttttaagccctgaagccctggggtaatttgctaggcaacaatggataactaatgcagcttctgtcacatcttctaggaaacttcttaacctgctctctcagtacaaaatcccctttctccatttggttccatgtaaacctctgttcatccttcaaaattcacctaaaggagtgtttcccaaaatagggttcaggtgtcagtggctgagggcatgtgagatgattctaaggggttacacacgacagttgttaaaaagcgttacaggctatgcttgtgattaagcgcctattagagaaaaataattgaaaatagcatattaatcacatgattggataaacattattgttttaagatgaggccaaagaaaaacagtgagttgctttaaggaaaatttttgagtaaatagcagtgcaagtgctattcagatcgtaaaagtggaacacgactaaaatttggaagcgcagtgaggaatagcaggaattcctctaggaaaccttccctgccgctccaggtgggccagtttgcccctcattcagacccctaaatacctaaatatctctccacttggcgctggtggaatgtgtcaggatcccatctctggctgatggaagtctgtgaggaggctgtgggctctgcatctgacctgagctccaagtctgcagggcaggccctggggaaggggagatggatggaaagtggggagtaaggacaagccaggagcccacacaaggtggaaggtttcgggacccacagaacctgcctctattcttgctgcctcatcttggtggtgcaggggacctgcaggagtgacctttgtcacagaggtcaacgcacacctggctcaggaggtggagaaactgaaggaggattggggtaaaggtggagcagtttcaggtcctgctgctgctccaggctgaccagccgagctagcagatgagcaacacctggacctgagccacggaagctcctgcctggatttccccagcatgaaatgcacaacggcggctgctttgggcaggtgtgtcccgctcccaccctaacaggaacctacagggaagagagttctgagaggtgtcgttcagcctagccacagtcattgtcaccacaccctcttatgggcctgagcacccttttctgtctgcccttcctgggaatgagaagtccctgagagcggggatgggtctcattcattttggggtcttagtatcattcagcatagggcttggcacagagcaggagctcagggagtgcacagtgaattaatgaatgattcttaaagagcccctacatttaagtaagaaatccatccattgaataagaaatccatccatcacaggttcttcctgtgtccacctgggtggggaaagatggactcatcagtggcctgaaagggatcaagttaagtcaccccaaaatgtaccacgttggtataaggattgttttgagctgaaggccattgagaatcaacagatgctggaagagcactgccctctccttatctacctagaagcagggcatatatttccttttgggaaggtgtttcctccccagaccattaagaaaagcaactcatcctggagatggcgagtccacactgagatgagtatgcatagaccgacctcactaacagaacctgcatctccatcagtgccccaggtatttccgggtcactgtcccatgatgtatcaccctttgaagaacaagcccctttcctttgttaaaatggtatataagccccacaagtctagccgtttcattttttcttttctgtgaactcccatgcatgtaataaaaattctctgccctttctgttgttaattggtcttttgttagtttaattcacaggcctccagatactgaacctaagtggatagaggaaaagcattccctccctgaaaggcagttttccagactaacaaacaaatgtcataagtatgtacatcttccagaaaacggagttgtctagttacatagtatgccctgggcaatggattaatacatgtaacttaggcaattcatctgaatttcagatttttgaaggctaagagctaccttcacaggaccaagtgatggtctctggagtctgggtgttttacagagctccattgatagaaataatctttgcaagaacattgtaggatgatgaataggatctgcttatatctcaagttgtctgggaagcggggacatttgctccttcttatcttgctgggatttctgtcaccagcagttggaagggactccagttttaagacaaaggtttacagtttctttggcaccaagagcaaaagaagcataaaactaggcagaaaggggtataatattatcatgttgagaaaaggaatatggaaaatgtaaccttttgcatctcctgagttaatgaatctatactctgagaagggcagaaatgagaaccacctccccatctctgcaataaattccctagaaggtttggattttagccaagaagtttctgctttcctggagaatgtctctcaattcaaactctaaaccccaaagccagaaaaggcaaacgttaccttgtctgggctttaatccaagttttcagtggctggaaacacggttacactcctggagacaaggtggccttggacacccaggaagagccctgctcccgggcacacctggccctggagccagaccacctgggtttgaaccccagctctgcaccttaccagcagagcttcctgtctggaaagtggagatgatcgtgatatcactgacctcagactgtggttgtctcaattaaattaacaatccatgttatgagtgtacaagtatcgggcacagagcattgactcaattaatactgatctgtaatgaatggggattcatgccaagtgctgatgatgtgcatgacattagtgctgactgctgtaagtactggaagccgtcatgataatgaacagtgactttcatcacagttcatggggtcctttgtgaaacatgagggggcattaagcagaaacagccagcccagccctctccaccaccctttgaggaggtgtatctatgcctggtttacagtgtggaaactgaggctcagagacggggactggattgtgcacggtcacccagtcatgaaggccaagaaatgatggatgggatgcaggctgtgtgctcagccccctccctgtggagcagctcaggggcgtggggcatccagtcgccctgaagatgctgctcttgtctgtctgcctctctctctttccaccacactaggtctctgtttctggctctgtctcctcttcactgtgtgtctgtggttcactttgtgtcttttcatctctgtgtctccctgtctgtctctgtctttgtctctctaccaatgggtaccttctgtctttccttccttcttttcttttcttttctcttctcttcctttcttccttccttcctttcttccttcctttcttccttccttccttcctttcttttctttccagagtctcactctatcacccaggctggagtgcagtgtcatgatcttggctcactgcaacctctgcctcctgggttcaagtgactctcctgcctcagcctcctgagtagctgggattacaggtgtgtgccaccacatccggctaatttttgtatttttagtagagacagggtttcaccatgttggccaggctagtgtcaaactcctaatctcaaatgatccgcccgtctcagcctcccaaagtgctgggattacaggtgtgagccaccactccagcctcttctttctgtttctgtgtatttatgagtgtccttcctcctgcacactgtctgtctctcactctgtatctctccagctctgtccgtctctttttctgggtctctttccctctgtgtctctctgtgcctccctctttgtctctgttctgattttgtgtggccccatcagcttgactatggtggtgtctccatgtccctcctcctcctctcagatgctcttttggttctgtgttttccttctgtctctgtgtccctgtgggggtctcaggaccaggacgagggtgaagtaagtgaggtgtctctgctgcaaaatctaaggagacacccaaatccagggttgcacaagtgaccccttaatttttagtcctaggccctttctctctcccctcactctctctcttttctggattacaacaccattgatttttaatcaagaatccacaagcctgggtcctctcttgtctcaccctagtcctgccctgcatctctctatggctcaccttctacttctccggctctggctcttgagttctccctctctccgtgcctctcctctccctccatctctctatgttagtgtctctgtccccttcactctctgtctctctctgtatctcccctctccacccccgtatttctctgactctgtctctctctgggtctttatcattttctctttctctctccatccctgccccaactctctctgtgtgtttcccagtctctctgttttcccctaagccaggggcttcatgttgtccatctgtattgaggtcttgggtggccagcagggttctctgcttagtgggggcttcccctcagtgctttccatatgctgtccagactgggggtgctgcagctagaaagggaagaaggtttccatatttcctgagactggagtcacatcctgtcaccaatgcactcacctgctgactaaccagtgtacttctgggaattgcaaatgcatgaaatggcacccattctagactagtcacggcagtgttggtgatggtcacagaccgggaacgaccctgacgtttatccatagagaactgggtcatgagccatgatccacatcatggatactggtcagctgtggcaaagaatgaggtatccttctgtctgtgcactggggaaggtttccaagatacaccgcacagtgagaaaaacaagaagcagaacagtgcacggtgtgctacctcttacattacaaaggaggaaatgtaaaattaatttacaaatggccaataagcacatgaaaacatgctcaacatcactaatcattaggaaaataaaaatcacaactacagtgagataccaccttacatccattacgatggttgttctcaaaaaaaaagaaaaacagaaaagaacaagtgttggcgaggagaaattggaacgcttgtgtagtgtttgtgggtatgtgatatggcgcaaccactgtggtcatttctcaaaaaattaatcatagacttaccacaagatgcagcaattcggcttctggtgtattccaaaaagaacggaaagcaggggccccagcagatatttgcacgtctttgttcatagcagcattattcacaatagctaaaagttggaaacaagcccagtgtccatccgtccgtgaatgaataaacaaaacgtggtctatatgtacaaatgaatggaattcagccataacaagaagggtggttctgatggtgcttcaacatgaatgagccttgagttctttctgctaagtgaaataatcagactcaaaaagacaaatttgcatgattccacttaacagaggtgcctaacgtcatgaaatgcatagacagaaaatgaaaaggtggttgtcagtggctggagggagggggaaagaggagttggtgtttaatgggcacagaattccagttggggaatatgaaaaagttctgggtggggatggacagtggtggtggttgaacaacaacctaaatgtacttcctgcccctggatatacacttaaaagtggttaaaatgggctgggcaaggtggctcacgtctagtcccagtactttgggaggttgtggcgggcggatcacgaggtcaggagatcgagaccatcctggctaacatgacaaaataccctctctatctctactaaaaatacaaaaaattagccgggcgtggtggcatgcacctgtagtcccagctactcaggaggttgaagcacaagaatcggttgaacctgggaggtgaaggttgcagtgagccaagatcgtgccattgcattccagcctgggtgacagaacaagaccccttctcaaaaaaaaaaaaaaagaaagaaagaaagaaaagaaaagaaaagaaaagaaaagaaaagaaaaaaagtggttaaaatggtgaattctatgttatatatattttaccataatttacaataattcctattgttttgcataaaacagctgtagaaagctttgcaggtcatgaacagcacagctggccactggggctggtgtggggctaggacctgggtgcacagggaacaggtatgagacacaggctcttcatgcctgcacacacatatggatacacaaggatgcaaatttctgagccatctaaatacaacacctattcaaaaaatcaaacagaaaaaggaaatgaatggagctgaaggatgagggcaggtggggcggctgctcgggaggactctggagaccacttcacccaacattcgaggcctctcttagcagctggagctcatccgggggacttaggagctctggaaagaggaacaggagagggccatggccggaggaggcctgaaaaagatcatctctgccacagagaagatgctggctcggatactggtgtcccccgtggaggcagggagacccagggagacaactgtattcattcaaggaggaatgggtggtggtgcaaacttgggtggaggccacagggtgcagaagacaggacacagcagagatagatgtaggacatggaagggacagaaaggagtgatcactggacgtaaaggggcaaggaaagtggaagcatgagaacatctgctgggcatccggctgagaggttgggtgtccagggtgcccttccctgagggagaacccaggacaggagcagattcagagaaaaccacccagctcactccagcaagaagcagaaaagggactggttaaaggacagggtaggaaggtcaccaagctccaagggccctcatgaagccagcttggaggccacagggcccagggcaaggaccaaaccacaggcacaggacagctccggtcaagatcttctggccactgcaggaggcagaaaccacaccctgcaccctgcactgctgaggctggccctggagtccagaagcttctacaccagaagcttctgtcccccatccccactcaaaaaattaaaaacaaaaagcaaatcggtgccatgcaccctctgcttcctggtgctgttcgggatcctgagtctttcacgggggcacctgatggggaaagcctggacccgtgtctgtgtccctcctgcaaggagtgctgggaaaatgaactttccagcttcctccttgggaagacagaacattccccatgtgtactggtggcatttaaaaactgcacggcagccagagaacatggaccgtgttccaccaggagagttcctggagggatgtcccggtgcagacgcccgtcccaaggtgggtatttgagctgaggaactgagaagccggtttctgcctagagttagagatccgacaggcatcagcacatggaagggagggaagctacgatgcatcgagggtgggagatcagatgaaccaggagaggcagggcccgggaggaaccccggggagcagccgcctttaaagcctgggggaagtagcttcagagaaggtgaggtaggttgggtgggggttgctggaaaaagataattaagaaacaaatttctgctcagcccagaaacccccgtcatatccgtagaagcaaaagaaacctgtcttatgactgagtaagcattaagccaaaatgtgatgcaatctgctaagagatgacaaagacagaaagaaatcccacctttgtatccagccaagcaggtgcaacccgttacacacgtggtctccagatagacggtgactagttcccagttgagaggactcaacggcaccatttgtcacacatagttcatcctaaattcacccagtaactgtgttgattctctgtgtggttaattggctttatccacaggaaaaacaaacctctcttatctatgacaggaggtagttttgcaactgggagtgagatgcccccagaactgaggttccttccttctcacagaaactgggagacaggggcgctttctgcccggatgcctgcctttcaaagagagggctcctatggccttgaggaggacagttctgggttgtgaggcaggcaagatgcttatgtatgctttagaaagctttacatacatcttcaagggacagagaaagaattttcaattacacctcttctaaaaaataaatgctctcaaagtccagcctgggcaacatagcaagatccaatctccacacacacaataataataatcaatttgctgggcacagtgggatgtgcgtgtagtcccagctactcaggaggctaaggaggaaggatcacctgagcccaggaggttaaggctgcagtaagcttggatggcaccactgcactccagcctgggtgacagagggagactctatcaatgaatgaatgaatgaatgaatgaatgaatgaagagaaaatgatctgagtgaaaagaggagagtctctttatctttttgcaacaggctaaacaaaatttttaaaaatgtatatttgcctcacagagattattccaggaaaagaagtggccctcagtgtcaaaggatgcaaaactaacctgtgagttcctggcaggtttagcaataaagcaggatgttgctgatctcagtacaagcaatgttagagaaaggggaagatggaagtggacatggacgagtgagtggcaggtgacaaatggaagcaaagaaacgtatccagaccactgaagatgcttgaccgagaaaaaagaggcggtggagggaatggaagcccaaggaagtcatttgttgcaataagaggcctcagagcacgtgtagggtgcggggcagagcccatgcagaggggctgtggaaggctggtagggtgcaggtggccccactctccatcaccctgaggagtatgtggtcagagttaaagctcagtctgtttctgggatcaggtaagaggtcagcgtccggagaagagaggtggatcttcagatcctgcagacctccaccgcgccctctgtccctcttgactgctttttctccatctccattgtctggctcacattcctgtcacgtcttcctttctccctgcccctcttttctcttttctcctctctttttcttaacccttgtacctttggaagtcccactaatagaatttaaacagcttttcaagttggttttttgttcccagaaattgactttagactctccatgaataatgtggaaatcaaacgagtataagctggttcatgtctctgcaattaaacaaataaaatcaacattccaatgctttcttcttccagagtagcccacatttgattttttttttcttaattactgtcacttgcgatagatttttaaatcttgtaacctggttacacaaataccatggggcaaaagccttacttcctgtgagaggaaaccaggcttgactagcctcatgctggctttgaagaagtaaaatcaggggttgatgaatttgcatagggtaaatatcaaaggtcaaaagtcaacaataggtggtagagggaataccccaaattataaaagaacaaactgtttaagccacaatagaattatcgtagaaataaaccacggtccttcccactaaaatattccacttagaattgtaaaatattttcctcaataactcctggaagagcctattaagaaattaacgaggctgggcgtggtggctcacacctctaattccagcacttttgaaggccgagatgggcagatcacttgaagttaggagtttgagaccagtctggccaatatggtgaaaccccatctctgctaaaaatacaaaaattacccaggcgtggtggcaggcgcctgtaatcccagctactcaggaggctgaggcaggagaatcacttgaacctgggaggcagaagttacagtgagccaagattgtgccattgcactccagcctgggggacaagagcgagacttcatctcaaaaaaaaaaagagtcaaacttgagccaggcatggtggctcacacctttaatctcagcactttgggaagctgatgaagtcaggagttcgagaccagcctgggcaacatgctaataccctgtctctaccaaaaatttaaaaattagatgggtatagtggctcatgcctgtaatcccagctatttgggaggctgaggcacaaggatggcttgaacccgggaggtggagcttgcatttagccaagactgtgccattccactccagtctggagtgaaaaaaaaatccatctcaaaaaaaatcacaaaaagaataaatatggggccttatgactgtatattactgggcttctgacctagactgaaagatcagggaagactttcctgaaaagaaagtgagctatgatgggcccactgtactccagcctgggcaacgtaatgaggctctgtctcaataaaaacatgcagaataaaaccacaataagaaaataagacaataaaaccactacagaactattagaatggctaagattaaaaagagtgaccacgccaagtgttggcaaggatgtggaggcactggaacgctcacgctgctggtgggaatgtaagatggtacaaccactatggaaagcaatctggcagcttctaaaaatttcagcatacaccatgccactcgtcaattccattccattcccacatgatttttatttaaaggaaagtcaagtggaatgatctttaaagcatttttgcctgacaaatagatgaaatgtgggtagcagcccaacactccctggtcagtcttcacagggcatatgtggccttatggcccccaggaaatatggctctttccacaagtgctatgtccactctcttcaccaatcctaagatgttagttccacagcactgctagcattgggctttgtctatttctttctttctttgtcttttttgacagggggtcttgctctatcatccaggctgaagtgcaatgatgcaattttggctcactgcaacctccacttcccaggctcaagagatcattccacctcagcctcccaagtacctgggactacaggtgcacaccaccatgcctggctacttttttatatttttggtagggacggggtttctctatgttgcccaggctggcctggaactcctgagctcatgcgatccgcccgcctcagcctcccagagtgttgggacagcaggcgtgagccactgctcctggagtgggctttatttatttctatttctatttccttttcctgtatggtgaagagattgaaaagcatgccttattttgcaggaagagatggaaggctagaaagaggaagtaaattgttcaggtaatagtgaaatgatagcaggtctagaatatcagcctctttactcaaagcccacaatttccaaatatcacaacttcctttctctttatacactttagggattttatttatttatttatttattattttttgccaaagtgaaactccaggtcaaaggactttgttggtctagtgtcaaattagcttccaaggtgttgatctaatccatggggccaccagcactcaaggatataggcgcacagcaatgtcagcctcatgttgtaatccttttattcatttttgctcctctggtcagtacacgaaggcctgtaaagatcctttcttttatttttgagatggagtctcactctgtcgcccaggctggagtgcaatggcacaatctcagctcactgcaacctccgccccctgggttcaagccattctcctgccccagccaagtagctgggattacaggcacatgccatcatgcccagctaatttttgtatttttagtagagacagggtttcaccatgttggccaggctggtctcgaactcctgacctcaggtgatccacccacctctgcctcccaaagtgctgggattacaggcatgagacaccacacccagccaggcctatgaaaatctttaagtgtaacttttcattaagtgccatagatccctcctctttataacataaagtcctgtaaactgcatgcaggtcagtttgccataggaataatttgtctttgctggaacatgctgggtgcttggcagatgaagagattggaagtgaaccactgagatgactgatgagcgtcctcagcaggctgtgttgcagggggaagagtgcaggttgtttataaggcctgggtcgtgcccctggccaccatttcctggctttgtgactccagctttacttctccttcccagggctcagttttcctctccttgaaggggatgagtggaaccagctctggacgctgagctgcctgggtgtaaaggcttcctgtaatgggcagaagagtggataggagggcagcaggggagctggaccaaaagcatcatgtgatttgccgtgatcacagaggattttctggaagtagcttgggcacaatgtgtgcaaggagacagaagggtctcgtggtggggaataggacattcacacagcctcctccatggcttacctcacacagcagttgttaattagccaagaatttgacaaacaggcattaaaggccttctgaatgtgacacacgacacccagctagaagaatattgccaaaaatcattaaaactactctaatcatagtctgagtcagacacatccaggtggtggaagactttacaaaaaaaaaagaagtgaaccattgctttcaatgacattaaagaaaatgaaaggcaggtggggagcactcctagattaaaggggagtccagagatgagatgtaaaccaaaaggtatctgagacaggtctccatcaacttagaagcttattttgccaaggttaaggacatagaaaaaaccatgcaatcatagaaacagtctgtggtctgtgcctttttccaaagataattttgaggacttcaatatttagggtggaaaagctggctggcggtgaaagaaggagggtgtggtcgcattactgaatccacatggtgtaagagaaagcaggaggtaggggaataatcaatcacgtattcatctcacgctcagtaaattggcaccttgagaaagataaggtgaatatggccgggcgtggtggctcacacctgtaatcccagcactttgaaaggctgaggtgggaggatctcatgagcccaggaacttgagaccagcatggacaacatggcaaaacccatctctacaaaaaaaaccacaaaaattagctgggcgcggtggtgggtgcctgtagtcccagctacacgggaggctgaggtgacagaatgacttgagcccgggagacagaggtcgcagtgagccaagatcgtgccactgcgccccagcttgggagacaaagtatgatactctctcaaaaaaaaataaataagtaaaaatttttttaaagaaagataagatgaacatagagtagctacctacggagatacttaaccttttctctgtagctgtctgcttaggaacaaaaggaaaggcagtttcttgcatgactcagcttccagttttttttttttccttctgtcacagtgaattggggtcctgagtttttgtttctctttcataaagacaacgcagtgcagttcatgcttgaccccggatgttctcctgatcagaaagcaaaaacgcaatgagagatgtcattgggacaacagaggaaaactggaaatgggcttcctattagacaacagtgcatctgtgtaaactacacgggtctgatcctggtctgtggttacgcaggacaaagtccttaagaataatctatataggctgggcgtggtggctcacacctgtaatcctagcactttgggaggccgaggcaggtggatcacctgaggtcaagagctcaggaccagcctggtcaacatggtgaaaccctgtctctactataaatacaaaaattagccggacgtggtggcaggcgcctgtaatcccagctactcgggaggctgggacaggagaattgcttgaacctggagggcggaggttgcagtgagcagagatcacgacacttcactccagcttgggtgagagagcaaaactgcatctaaaaaaaaagagagagagaggaaaaaaaagaatgatatatgctttttaaaaatttttttatttatttattttttgtgatggagcctggctctgtcacccaggctggagtgcagtggtgtgatctcggctcactgctgcaacctccaccaccagcttcaagtgattctcctgcctcagcctcccaagtagctgggattacagttgtgtgtcaccatgtccagctaatttttatatttttagtagagatggggtttcaccatgttggccaggctggtcttgaactcctgacttaaagtgatccttccaaagtgctgggattacaggtgtgagtcactgtgcccagcccccttaagaataatcttaagaaggttcttgctgaagcacttagtggtgagagttacaatgtctactccttgtttttaaaatttaagaatattttaaaagcatatgttgtgtgtgtataaacagatacaataaaatgtgaagagtgggtgaatccagtgaaggggatacttgtgttcactgtactatccttgcaacttttctgccggtttgaaatttttccgtctttttttttgagatggagtcttactctgttgcccaggctggagtgcagtggtgcgatctcggctcactgcaacctctgcctcttgggttcaagcgattctcctgtctcagtctccggagtagctgggactacaggtggctgccactacaccgggctaatttttgtattttttttttaagtagagatggggtttcaccgtgttgtccaggttggtttcaatctcctgacttcaatagatccacccgccttggcttcccaaagtgctaggatgactggtatgagtcaccgctcccagcctgaaatttttcaaaatgaaaacaccgcaggtcaggagtttgagaccagcctgaacaacatagtgaaaccctgtctctattgaaaatacaaaaattaaccagacatggtggtgtgcacctgtagtcccagttactcgggaggctgaggtgggagagttgcttgagtccaggagatggaggctgtagtgacctgcagtgagctacaactgcaccactgtactccagcataggtgagagcaagactctgtttctaaaaaaaaaaaaaaattactgggcatgtactgtatgccatgtaggtggtggagacatagcaggagatcagacaaacacttccctgtctgtgtggcaaatattaaacttgcaataaacttgcaaagacaaataaagataaaatttatagagatgtcaaaaataaacatataattgcaagtcacattcatttctctttctctgctattcctgctctcgccttccctcttctgcttctcctctctccgtcacagacacccacaacgtccctctgcagtcactgacagataccccaggttccttcctgtcttcctccccgccaccccagtgtgttacagctgatttgtacagccctggacaagcccatggttaaatagctagggatttcatcagcctggttggcaaactgtaggtagcttaaaatcagacatgctatgagtatttacaccagagaaataggccaacactacgaggcaggatttgtgggtattgtttttcagaaaacttggtttttcagcacaacactgctctcccatcggcttccagcaaataaatgttgcatttttcagatatatcctaattctttcatagatattcagtctctactccacctctggccaagcctttcctggtggtaggaaactggggacttgagtcctatgttgtactgtgagggtagagaatagaagagaaagcatgagagaaaagcatgaaaagaagaatcaaaagaaagcaatataagaaggaaagagaaagaacagagaagtgggaagacagtggagggtagaaactaggaccggaagacatggggacaagctgatgcccactgcacaacgtcctcacaggtagttgggccatttccccatctggggtacagaggtggccagggagcccatgagaaatgaggaaactgccttcccaaactactggagaaagagggtgggggtggtgatccacatagctgggctcaggaggaaagagggctgggagtctggaccgggggaacctcgggtcaagatgccacagtttctaactatggagggcctgggggcctggactcctgggtctgagggaggagggcctgggggtctggactcctgggtcggagggaggagggcctcggggcctggactcctgggtctgagagagggaggcctggggcctggactcctgggtctgagggaggaggggctggggggctggactcctgggtctgagggaggaggcactgggggcctggactcctgggtctgagggaggagggactgggggcctggactcctgggtctgagggcggaggggctgggggtctggactcctgggtctgaaggaggaggggctgaggggctgggggtcctggaccctccatctgagggaggaggggctggatgcctggacccgaaggtctgaggaagaaagggggtccctgataggccactgcggccattgagacttggggtggggcccaagcctccattttgcaaggccctcccctccccacccttttctgggctggctgcttaagggctggtataaaggacttgtttcctgctgaaaaagcagaaagagattaccagccacagacgggtcatgagcgcggtattactgctggccctcctggggttcatcctcccactgccaggtgagtgatgagcccagcctggaggagattccctggaggccgggcaagggaaccctgctgagatggatttgctcttgccactccaggagtgcaggcgctgctctgccagtttgggacagttcagcatgtgtggaaggtgtccgacctgccccggcaatggacccctaagaacaccagctgcgacagcggcttggggtgccaggacacgttgatgctcattgagagcggtgagaaggccctggcgtgcagagaccccgccctgtcccctcagtcccttgatccctgtgcagggacccgggagccacccctccgggggatcgactcctagggtcccggtgatcccctttccagcctctcagcctacgccgtgtagcagcgtctccctccaggaccctggaggcctgacctccatcctcgcttgcctccctctttcggtccaggaccccaagtgagcctggtgctctccaagggctgcacggaggccaaggaccaggagccccgcgtcactgagcaccggatgggccccggcctctccctgatctcctacaccttcgtgtgccgccaggaggacttctgcaacaacctcgttaactccctcccgctttgggccccacagcccccagcaggtgcctgcgggagggtcgggaggagagggaggggctgctagaaggggatccgctgagcacagaggggctgttacggagtccctcccaccctcgctcgctatcccgaccctcgctggctccatccctcccctgactgctccctgaccatcgccccgccccgctccctttccatccctccccactcactcccgatccctcccaccgacctgccacccgggaatccccgcacccctcctcttctaagagcaaacaggacggatttctgatatgaaatcaccattaactgggttatcctgcattctttttttattctgttgcgtttggttcaagaagttctcctgcagggtttttgctatttcctcttcctaagggagactgaactgtaactttccactttccttgtctggtgttataaagagtctagggagatattttgcgcttcttttattggaacagcttgtgaacacagaagtctcctgttcttggaggtttagtagcgcttgcaggtgaaggcactggctcgttccagggcaccccctcattcccttgaccaatgagtctgcttctgtgtctcccctcggaaggccagactttgttgaaaggttcagacttgaccatgtctgagtctacatttggcctcagcaggcccctcctccaccctgcccaccccccacccccacttgccacccaagacacccccccttttcttttctttttttttttttttttttttttttctgagaaagcgtctcgctgtgtcgaccaggctggagtgcagtggcgcaatctcggctcactgcaacctccgactcccgggttcaagcgattctcctgcgtcagcctcccacgtagcagggactagaggagcctgccaccacgcccggctaatttttgtatttttagtagagacagggtttcactatgttgcccaggctggtcttgaactcctgacctcgtgatccacctgcctcagcctcccaaagtgctgggattacaggtgtgagtcaccacacccagccaagaccactttctgtacccagccctgggtgcctctacccagacctcctgttcattctcccttcctcttttatggattacacttctttattttcccacatccagatcccatgatgggagctgcagaaggcccctttgggaaggctgagcaggttgactcttgaggccagcaaaagtggggtgcagagaaggtatctgatcaaatccagtgccctctcagtgccccctcactctgtctgtcactttcctagacccaggatccttgaggtgcccagtctgcttgtctatggaaggctgtctggaggggacaacagaagagatctgccccaaggggaccacacactgttatgatggcctcctcaggctcaggggaggtaagcctgggacatcggggtccctgtggggactgaactggaaggtctggggactgagatcttaggctttggggagtgaggtgagctgaggcacggcatgagacccagaggagggtgggcctggcttcctggagctatgcctgcctctgagggttgggtggtcctggaggcagcatcactgactctccctcgctccccctttctgcaggaggcatcttctccaatctgagagtccagggatgcatgccccagccagtttgcaacctgctcaatgggacacaggaaattgggcccgtgggtatgactgagaactgcgatatgaaaggtgagtcctgcccctaggctgtgccctggactgcagcctcggggcacgatgacacatggggcatccagagccatcacaccaaagccagcaggaggaaggtcaagggtgcagggtgggttgcttggcatgtggctttaggcaacagtgagtgctggggcccctgctggctctcaagctgctgagagtgactggttgcttcaatttctgtgtctccacacccctggccttgggtaaccctaggtctcccacttccctaggccaccgtagcctctctcccacccgtatcagcccccgccccgctcatggtgctggagtgccccagcagccttgcctgcacaggagagaacatcagagagaaaatcaaggggactttgggtgtgacagagaaagcaagagttaaaggaggacactgagagggtccccacttacccatttaggtgctgccatggaagagagtgccagggaatgtctccataagaagggctccaaagcaacaggaagccatggtggggaggtgggggtcttataggaatcccagcttccctcctagaagcaaagtcttccctgcccctgcctcagtttccttgtctgcccacatcacgctaacccttagagcttagaagagagagttgtgtgagctctgcacacattcctctgtgtatttggctgtttctccctagctaggctgggagcctgaggctaggggcttggtaccactggcaccagggtttccagccttgggtagctcaggagacggctcaggaagggtaccaggaggtgtttgctcaagtgaggacatgcagggctcacttgagcaaagctccctcatgagtcagaccctgtttctacctgaagggcctccaggactaggagggggaggtgctacagacacagatggtcacagcttgaggtgatcagggctgtggcaaacggggatgtggggcctggggcagctcagaggaggaaaatactgatgttgttggggtagagagtcaaggagggctttacagaggaggtggcctgtgaaccgtgtgttaaagatgacctacagcttattggtagaagaggaagaggacattggtggcagagggaacagtgtgtagcagctgcataggcctggaggtgggagtgagcctgctgttttcaagaagagtccctcactccacctgagaaggactcatcaagatgagggggtacagctgggattgggggtgattcgaagttttccaggtggacaaggtgggtgtggggtcgaagagggagctgctccaagccaaaggcacagcaggtgtgaggctgaggaggaaatgaactggcatgccttcagaatggatactggtgggggaggaagagttaagtggggaacctggtggtcgctcaagtacctgaaaacccaggctgaggggtggaccctctcctgaaggcaggggagccatggaagattgtggagcagggagggcagggtctgagccatttatctttccttttgactgatgctgctgttaaggatctggccctggtctctgggaccagatgacactgataacccagaaggtatttcagaaacaaatcagacgcaacacatgccacacacacagcccacaataagcacagcagacacgaatgcgtcacaccatgacacatacacaccacacatcacataccacacacacactcccccatacccctgacataccacctatggaacacaaatcacacacagagcacacaatatgcacaacacacacaaatgcatcacacgagtgcacaattactacgtgtacatgtagtgtgtatgccacatactacacgtcaggtaccacacacactctccctctcaacatatcagacatgcaatacataccacacacaacacacaatacacacaacacatctggcatgccacacacaccacatgcaagcaaaacacagatacacagaacacacaccacaccaaacacacaaaacaaacacataccacatatatcacacacagtatgtctacacatgcacgcaccacacaaacataccatgaacacaccacacaccccatacaaccacaccccccacatgtatactacgcactcacacacagcacacatacctgcacacatcacgcatgtgcacacactacacaaacgcaccacataaaacacagcgactatgcaccaatcagtgctgttcatagagattcatctgctttcaacactggagccagatcttgcaggctgttttgcctccctggtgaagtgcagttcagcagtttagcagacagtgagcatcacaagaccaggcatcagaaactgggggaacaacaagacgttggggaccaagtgcaggagagaagaggcttcagggtgatggaaccgcttataagaagccgcagcagtgggagggctgggtgcaaggatgcaggttactaaaaggggccatggcagcagccccttgtgaagaaccaaggggcccgggcagataaggccctggctgcccctagaggagctgggcagcggtcccagtgagagagcagggaagagcccacgtctgaatcagggacacgtgggtcccaggcccagctctgccgccgaaacagctttccagcctcagcttcacacgaggatcaaaagtctccatatctcatggagcctctttccctggatttggggaagaggaggggatggttgcagacatgggacggaagcagatgcaaagaccatgatgtgggtgagtgcctgccagaaacacctgtgcggagcagagtgatggagggagcagggaggcggccgcgtcttatcaggcctcccgggccattggaagggcttagaattttattctccagaatggggacctcctggagtcttcggagcagaggagtgacatgaactgacttaggtttacctagcctccctctgcctgctgggtggagaatggagcgagaggaacagtgacaggcgggtgcagggattgccccaggagtcaggtgggagtgaagcggggggcttggaggcagcagaggtggtgacgtggggttgggttttgaagattttctgcagctcaagccagtaggattacttgaggaacacaatgtgggagagaaagagcgtggtcaaggacaacaccaatgtgttcagctagactggcagaaacgagccgccacgggtgtaagtaggggagatgggagtggggagagaagggtgggagaagggagcaggagccatgattttgattttgtcatctgtgaagtatgcaaatgagcagccctccagggtggcatcggttctgcaggtcgcatgtgttggtggaagctgggggctcagtctaagagtccctgcatcatgggaccgatcccccctgctctgtgatggccgtgaggggaggccaggggctgtggtttcacactagagccttgagggcctcggggccaaggtagccgaggatggtcttcagtacctgtctccctcctgctcccaaccccgaccctgagggtccagagtccctgggttcccagcctacctctgccactcacaagctgtgtggcatgggcagctactgagcaatcctgcctctgtttcccttgttgcaaatgagggtgttgattgtgatcacaccacctactgctggggtgctgtggggaaatgaggcatcccagataagctgtgttccctggaaccttagatgggtggatctgtgggaagcaatgaggtcagccaggtgcagaggcagtgctcagcggcagtgctcagcccaccctggcccttcgcatcttgtttggaacatagggctttgcaactgaaaggtatgagaaaggtctcaggctgccttccttattattgaaatgaggaccttaaagctcagatggggaagcagagatgggatgaggataaggaagagcttccattgctctcacagctaaagcaaggaacggccgttcccccagggctgtgagaggacgtccctgcgggtgttcaagcagaaacagggaacaatgggggtgggatttcgactcccaagtcccttctgaatccttggttaagggaatctgtggccaggtcacctggagtgtgactcaagagtgtgatcaccttccctagcccaggacgtggagggacagacatggtgggttcctggcttacacacaccctgggattcctctccccagattttctgacctgtcatcgggggaccaccattatgacacacggaaacttggctcaagaacccactgattggaccacatcgaataccgagatgtgcgaggtggggcaggtgtgtcaggagacgctgctgctcctagatgtaggtacgtggactgaggtagaagacgaacacctgtcccaagtccctggcagctccctccaccccactggattctttcccctgaatttcctgctcagctcccttcacatctgcaattttcaatccgactcttcttctctctgcatcttgggttccccttatgaaaactgggggtgaagcagtgggaatgacagtgtctgcctttctggggaggggtgaccacgtatgcggtaatccctgcccagggtggagaaccgtgccaacaccgaggactctcagtggcttcatacattctggaaatgtttatccagcatttgttttaggtgccgcagatccaatcccatctgtattcctgcagctttatatgccttgagaaacaggaaacaaacaaacaaaaagcagcaaagtatggggaatggagatcccagctctgcagagaaatctggcaaggaaaaggagataggaaaagtgaggggaaggctgcaattttaagctcagtgctcaggggagactcatggagaaggtgacctttgagcgagaactgggaggaggcagagcttcgggcaggacccaggccccagcctccgtctttgccccacactaaacatgacccagcagttgtgatcagggcattcaccctctgcctggggggtattgtgaagggcagggagtccagctctggagcccctgctgccctgggagctgcccagtccccagcccagctttccctctcaccctcaggactcacatcaaccctggtggggacaaaaggctgcagcactgttggggctcaaaattcccagaagaccaccatccactcagcccctcctggggtgcttgtggcctcctatacccacttctgctcctcggacctgtgcaatagtgccagcagcagcagcgttctgctgaactccctccctcctcaaggtatgggatccagggccgtggagaaatgaggcccagacacacagagactctggcccaaggtggccagctgctctgagcacaaagtcatgtacccccaccttccctctgctccccagctgcccctgtcccaggagaccggcagtgtcctacctgtgtgcagccccttggaacctgttcaagtggctccccccgaatgacctgccccaggggcgccactcattgttatgatgggtacattcatctctcaggaggtgagtgctgcaagcagggccccaaggatgaaggcactggtggcctggactcctgggtctgagggaggaggggctgggggcctggactcctggtccgagggaggaggcgctgggggcctggactcctggtccgagggaggaggggctgggggcctggactcctggtctgagggaggaggcgctgggggcctgggctcctggtcccagggaggaggggctgggtgcctggactcctggtctgagggaggaggggctgggggccggggctcctgggtctgaggagctgaggctctggactcctgggtctgaggtaggagggactgggggcctggactcctgggtctgagggaggaggggctgggggcctggacccctgggtctgaggagctggagctgggggtctgggctcctcggtctgagggaggagggtctggggcctggactcctgggtttacaacttggctgggctgtactctgtgtcctttctgacttggtcttctccctctaggtgggctgtccaccaaaatgagcattcagggctgcgtggcccaaccttccagcttcttgttgaaccacaccagacaaatcgggatcttctctgcgcgtgagaagcgtgatgtgcagcctcctgcctctcagcatgagggaggtggggctgagggcctggagtctctcacttggggggtggggctggcactggccccagcgctgtggtggggagtggtttgcccttcctgctaactctattacccccacgattcttcaccgctgctgaccacccacactcaacctccctctgacctcataacctaatggccttggacaccagattctttcccattctgtccatgaatcatcttccccacacacaatcattcatatctactcacctaacagcaacactggggagagcctggagcatccggacttgccctatgggagaggggacgctggaggagtggctgcatgtatctgataatacagaccctgtcctttctcccagtgctgggatttctccatgtgagggggcagcaggacacccagggatctagcgtgggggaggagaggagcctaatgagaaaatgaccatctaaagcctgcccttcattggtctggttcacgtctccaaaccagcttggatggtagcagagacttcagggtgctccagccaaacgtatttgggcatcaccatgacctgggaggggaagatgcactgagacgtatgaggcttccagcctagcagccagggccctagcacaaacaggaggctcgccccatctgagcaactgcaggagaggttagtacagtcatgcattgcttaacgacagggacgtgtcgttagaaatgtgtcgttaggtgattttatgaccataggaacattgtagcgtgcacttacaccaacccagatggtacagcccaatacacacccaggatggacgctagagtcgactgctcctaggctacaagcctgcagtgcatgttatggtgtgaatactgcaggcaatcttaacaccacggcaagtatttgtgcatctacacacatctaaacatagaaaaggtacagcataaatacactattgtcatctcagcagaccaccgttctatacgcaattcgtcgctgacccaaacgttgctatgtagcatctgcgtatcgtgggataattgacatgagggcttgagagaactccagaaaaaaatgggttagcattttcccagagctgttatcattgggtctctcttaccaccatagcccaaaaagggtgaggagaagagccactgctggaatctgcagacagagagagagagagagagagagacatagacagaaagagacagagagagctggagagagagccggagacagaaagagagagatattcagagagggttgcctaacaagagctcccatctcaggctgaaaaacgcgtccagcccacaatgatactggggagggaagtggggaactaaaattccaaactgatgtcctcactctggtctccagttgaggttccccattgactgaaccccctagaggccacagaagcaggagactccactggtccagcccccatagatctgccattcacactacagaacagaggagaggagagggaagaggagaagagagcgaatctggagaaggaaacagaacacgtctagtaccgttcactcccttgcccctcggcatccaccctttccctttgtccaaatgaaaatcaaagtccaggacgggctcggtggctcacgcctataatgccagcactttgggaagccgaggtgggaggatcacttgagcccaggagtttgagaccagcctgggcaacatagtgaaaccgcttctctacaaaaaaatacaaaaaataagccgggtgtggtggtgtgcgccccctccctctactggtcccagctactcagaaggctgagtccaggaggtcaaggctgcagtgagccaagactgcaccactgcactccagcctgggcgacagagcaagaccctgtctcaagggggaaaaataaatcagagtcctccgtacagatgacacacaattccagtccttccctctgtcacagtaacagtgtgtgatggtgacagtgatgtcctcctcccattgtgctgggcaccagttcttcacccacaatgagagaaagatggggaggagatggcttccaatacagctgctgaggtcctgggggcggggctgctggtgcttagagctgctttcttccagtacattccacattgtcttcccacttccaaaacctcctttggatgttatttgttacctgcagtgtaacccaaatcttgattcttatggagagtgagtcttggatggccttgtctttagtgggtttctgtagttttccatggaacagggccctggccaaggaaatgttaccgccatgagttgcctgccttcgaaaatagcctccttgtcccagccacccgacctccctctgtaatcagatgccattcccccgactgcagagtgacgtctcctttgcctgctgttttggcagcacaaggggcacaggatggctggagggctgtcatggcttcctgcagatcagaactaggaagagattcctcatccacagcagcccagggccacggggacaaagagcaagcattctctcagtgggctggcaggtgcagtcacgggagggagccgcgcttattcttcctgtctttcctggatctttgcatctggccctggggcgcgtgacccgatagcctggttgctggtttataagatgtgtggcccctcctgtgggtggtggggtacggtctccctcccggtgccctgataagccacacatgagccattgcgccaatctgagaagcagctgtgtctgtatagaggggcacctgagacggtcagtgggttccatgggtgtgagttaattaccccccattctttgcgttaacacgtgtccccagtggaagcaaccctgcatgggttccagagccacaggaaaggcgctgttcacagaagcactgagcagggtccagggaaggccaactggaacccccagtgtgtgcgtatccgtgtgaggacaaagcccagtcccctccaggatgggacgtgtcctgtgtggccagcctatctgcagtggccgggtagtcctcctgtaaaatgacgccttccaggggcttagccccgggctctgcctacactgggcagggctggatacagtgtgcagccaggccagtgctgggagactcagtccacttgtggtaaggtatgtcgccgtcctccctatccatgtggccatctgcacctggaccccctgaacaagctctgagggacagagtctgcctgacaccatccaccaaacaccaagaacctcatccccacagcacaggttctgggcttaagggtggggacggcatagctcacactttgtgcccatccccagaggaacatccatgtgtcctccctgtcttaagtttactcttttattctcttcaagtccttgaccatgtggcccgctctgggttcatgcaatggacccaagtccatccctccttgcagaacccctgaggttctgcccatctgaaggatttcccttcatcactcctcaggaccacctgaagtgggcactaaggcagccgccgtccacttctgctgggcgccagctcaccgtgaggacccatccataagcctggtctgcactttcctcctctgtatgaggtcacagggcttcccaggagctcacagatgtggtagagggaggggcagaaggacaggtgccatgggagcctgagtcacttgctggcctcagacctgcttgagcctgaccccatgctcagctgtcccgtggatgctggaggctgctgtgcatgccccaggttatggtttggtagctcagagagcacccggccctgaacttgattgcacttggcccagggatgagccaagagctgctttccgaatggtcagagttacctgcaggaggaggcgcggaatttctctagaacctccagctctgcactgttaatcttttggagcttgtgaaaatctccataaaataatgcactagatttgaaacatagactctcttacattttttcgtttctaaatatactctaaatatactcatccaggagttatcgagaataatattttgcaattccaactggagtaatgtactgggaagtgctgtggttcatttctttctttctatttttttttttttttttgagatggagtctcgctctgttacccaggctggagtgcagtggcgtgatctttgctcactgcaacctccgcctcctagcttcaagcgattctcctgcgtcagcctcccgagtagctgggattacaggcacccgccaccacgaccggcaatttttttgtatttttagtagagatggggttttgtcatgttggccaggctggtctcaaactcctgacctcaggtgatctgcctgccttggcctcccaaagtgctgggattactggcgtgagcctgtgcttcatttcttttataattctattgtggtttaaatggcccgttgctttcctaatttgtgggtattccctgtatcacctattgtttactttctacctctctgatatttaccgtatatgaatttatcaatcctgattttacttcttcaaagccagtatgagtttagtcaagtctgatttccccgtacaggatgaaaggtttttgtgggcgtcaagcaagaacattgtaggatgctgaataggatctgtatacatctcaagttgtctaggaagcagggacatttgctccttcttatcttgctgggatttctgtcactagcagttggaagggactccagttttaagacaaaggtttacaatttctttagcaccaagaaaaaaagaagcataaaactggagagaaaagggtataatattatgttcagcaaggaatatggaaaatataatcttttgaatcttctgagttaattaatctgtactctgagatgggcagaaatgagaaccacgtccccatctctgcaataaattccctaggtttggattttagccaagaagtttctgctttcctggagaatgtctctgaatttaaacaccacacctcaaagccagaaaagggaaagtttactttgggctttgatccaagttttcagtggctggaaacacggttacactcctggagacaaggtggccttggacacccaggaagagccctgctcctgggcacacctggccctggagccagaccacctgggtttgaaccccagctccgcaccttaccagcagagcttcctctctggaaagtggagatgatcgtgatatcactgacctcagactgtggttgtctcaattaaattaacaatccatgttatgagtgtacaagtatcgggcacagagcatcgactcaattaatactgatctgtaatgaatggggattcatgccaagtgctgatgatgtgcatgacattagtgctgactgctgtaagtactggaagccgtcatgataatgaacagtgactctcatcacagttcatggggtcctttgtgaaacatgagggggcattaagcagaaacagccagcccagccctctccaccacccttgaggtggtgtatctatgcctggtttacagtgtggaaactgaggctcagagacggggactggattgtgcacggtcacccagtcacgaaggccaggaaatgatggatgggatgcaggctgtgcgctcagccacctccccgtggagcagttcaggggcactgggcatcgggtcgccctgaagatgctgctcttgtctgtctgcctctctctttccaccgcactgggtctctgtttctggctctgtctcctcctcactgtgtgtctttggctcactttgtgtcttttcatctctgtgtctccctgtctctctctgtctttgtctccctctcacttggtcccttccttcctttcttccttccttccttccttccttctttctttctttctttctttcctttttctttcttattataacaccattgatttttaatcaaggatccacaagcttgggtcctctcttgtctcaccctagtcctgccctgtgtctctctacggcacaccttttacttctctggctctgactctctgagttctccctctgtccatgcctctcccctccctccatctctctgtgttagtgtctctgtaccctttcctctctgcctctctctgtatctcccctctccacccccatatatctctgactctgtctctctctgggtctttatcattttctctttctctctccatccctgcccccattctctctctgcctttctcgatctctctgtttctcaccctccttctgccttcccctaagccagggacttcatggctctgatggctgtccagcggtgttgcccatttttattgaagtatccttctgtcgacccacttggaaagacttccaagatacactgcacagtgagaaaaacaagaagcagaacagtgcacagtgtgccacctctggcattacaaaggaggaaatgtaaaatgaatttataaatggccaataagcaaataaaatttggtcaacatcacttatcattaggaaaatggaaatcaaaaccacagtgagataccaccttacatctgttctgatggcagttctgaaaaaaaaaaaaaaaaaaaaaacaaagtgttggcgaggagaaattggaatgcttgtgcagtgtttgtgggtatataatatggcacaaccactgtggtcatttctcaaaaaattaatcatagacttaccacacgatgcagcaattctacttctggtgtattctgaaaagaactgagagcaggggccccagcaggtatctgcatgtctttgttcatagcagcattattcacactagccaaaggtgtaaacaagccaaatgatatggctttcctctgtccgaacacaaatctcacgttcagctgtaattcccaaaggtcgaaaatagcctccttgtcccagccacctgacctccctctgtaatgagatgccgttcccccgactgcaagtgactcaggctcccatggcacctgtcctcctgcccctccctctaccacatctgtgagctcctgggaagccctgtgacctcatacagaggaggaaagtgcagaccaggcttatggatgggtcctcacggtgagctggcgcccagcagaagtggacggcggctgccttagtgcccacttcaggtggtcctgaggagtgatgaagggaaatccttcagatgggcagaacctcaggggttctgcaaggagggatggacttgggtccattgcatgaacccagagcgggccacatggtcaaggacttgaagagaataaaagagtaaacttaagacagggaggacacatggatgttcctctggggatgggcacaaagtgtgagctatgccgtccccacccttaagcccagaacctgtgctgtggggatgaggttcttggtgtttggtggatggtgtcaggcagactctgtccctcagagcttgttcagggggtccaggtgcagatggccacatggatagggaggacggcgacgtaccttaccacaagtggactgagtctcccagcactggcctggctgcacactgtacccagccctgcccagtgtaggcagagcccggggctaagcccctggaaggcgtcattttacaggaggactacccggccactgcagataggctggccacacaggacacgtcccatcctggaggggactgggctttgtcctcacacggatacgcacacactgggggttccagttggccttccctggaccctgctcagtgcttctgtgaacagcgcctttcctgtggctctggaacccatgcagggttgcttccactggggacacgtgttaacgcaaagaatggggggtaattaactcacacccatggaacccactgaccgtctcaggtgcccctctatacagacacagctgcttctcagattggcgcaatggctcatgtgtggcttatcagggcaccgggagggagaccgtaccccaccacccacaggaggggccacacatcttataaaccagcaaccaggctatcgggtcacgcgccccagggccagatgcaaagatccaggaaagacaggaagaataagcgcggctccctcccgtgactgcacctgccagcccactgagagaatgcttgctctttgtccccgtggccctgggctgctgtggatgaggaatctcttcctagttctgatctgcaggaagccatgacagccctccagccatcctgtgccccttgtgctgccaaaacagcaggcaaaggagacgtcactctgcagtcgggggaatggcatctgattacagagggaggtcgggtggctgggacaaggaggctattttcgaaggcaggcaactcatggcggtaacatttccttggccagggccctgttccatggaaaactatagaaacccactaaagacaaggccatccaagactcactctccataagaatcaagatttgggttacactgcaggtaacaaataacatccaaaggaggttttggaggtgggaggacaatgtggaatgtactggaagaaagcagctctgagcaccagcagccccgcccccaggacctcagcagctgtattggaagccatctcttccccatcttcctctcattgtgggcgaagaactggtgcacagcacaatgggaggaggacatcactgtcaccatcacacactgttactgtgacagagggaaggactggaattgtgtgtcgtctgtacggaggactctgattattttttcccccttgagacagggtctcgctctgtcccccaggctggagtgcagtggtgcagtcttggctcactgcagccttgaccttctggactcagccttctcagtagctgggaccacaggcgtgcaccaccacacccggctaattttttgttgtcttagtggagactggatttcacggtattagccaggatggtctcaatctcctgacctcatgatctgcccgcctcggcctcccaaagtactgggactacagacaggcacgcaccaccacacccggctaattttttgtattttttgtagagaagcagtttcactatgttgcccaggctggtctcaaactcctgggctcgagtgatcctcccacctcagcttcccaaagtgctggcattacaggcgtgagccaccgagcctgtcctggactctgattttcatctggacaaagggaaagggtggatgccgaggggcaagggagtgaacggtgctagacgtgttctgtttccttctccagattcactctcttctcctcttccctttcctctcctctgttctctactgtgaatggcagatctatgggggctggaccagtggagtctcctgcttctgtggcctctagggggttcagtcaatggggaacctcaactggagaccagagtgaggacatcagtttggaattttagttccccacttccctccccagtatcattgcgggctggacgcgtttttcagcctgagatgggagctcttgttaggcaaccctctctgaatatctctctctttctgtctccggctctctctccagctctctctgtctctttctgtctatgtctctctctctctctctctctctgtctgcagattccagcagtggctcttctcctcaccctttttgggctatggtggtaagagatacccaatggtaacagctctgggaaaatgctaacccatttttttctggagttctctttagcccttatgtcaattatcccacaataggcagatgctacatagcaacgtttgggtcagtgacgaattgcgtatagaacggtggtctcctgagatgacaatagtgtatttatgctgtaccttttctatgtttagatgtgtatagatgcacaaatacttgccgtggtgttacgatgcctgcagtattcacaccataacatgcactgcaggcttgtagcctaggagcagtcaactctaccatccatcctgggtgtgtattgggctgtaccatctgggttggtgtaagtgcactctacaatgttcctttcgtgataaaatcacctaacgacacatttctaacgacacgtccctgtcgtaaagcaatgcatgactatactaacctctcctgcagtcgctcagatggggccagccccctgtttgtgctagggccctggctgctaggctggaagcctcatacatctcagtgcatcttcccctcccaggtcatggtgatgcccaaatacgtttggctggagcaccctgaagtctctgctaccatccaagctggtttggagacatgaaccagaccaatgaagggcaggctttggatggccattttctcattaggttcctctcctccaccatgctagatccctgggcgtcctgctgtccccttacatggagaaatcccagcactgggagaaagcacagggtctttattatcagacacatgcagccactcctccagtgtcccctctcccacagggcaagtccggctgctccaggctctccccagtgttgctattaggtgagtagatatgaatgattatgtgtggggaagatgattcatggacaggatggggaaataatctggtgtccaaggccattaggttacaagcacaagggacggttgagtgtggtggtgagcagcggtgaagaatcgtgggggaaatggagttagcaggaagggcaaaccgctccccaccacagcgctggggccagtgccagccccaccccccaagtgagacactccaggcccccagccccacctccctcatgctgagaggcaggaggcggctcatcacccttctcacacacagagaagatcccaatttgtctggtgtggttcaacaaggagctggaaggttgggccacacagccctgaatgctcattctggtggtcagcccacctagagggagaagaccaagtcagaaaggacacagagtacagcccagccaaattcataaacccaggagtccaggccccagaccctcctccctcaaacgcaggagctcagacccccagcccctcctacctcagacccaggagtccaggcccccagccccttctccctcagtcccaggagcccaggacaccagcgccttcatccttggggccctgcttgcagcactcacctcctgagagatgaatgtacccatcataacaatgagtggcgcccctggggcaggtcattcggggggagccacttgaacaggttccaaggggctgcacacaggtaggacactgccggtctcctgggacaggggcagctggggagcagagggaaggtgggggtacatgactttgtgctcagagcagctgcccaccttgggccagagtctctgtgtgtctgggcctcatttctccacggccctggatcccataccttgaggagggagggagttcagcagaacgctgctgctgctggcactattgcacaggtccgaggagcagaagtgggtataggaggccacaagcaccccaggaggggctgagtggatggtggtcttctgggaattttgagccccaacagcgctgcagctttaggtcgccaccagggttgatgtgagtcctgagggtgagagggaaagctgggctggggactgggcagctcccagggcagcaggggctccagagctggactccctgcccttcacaataccccccaggcagagggtgaatgccctgatcacaactgctgggtcatgtttagtgtggggcaaagacggaggctggggcctgggtcctgcccgaagctctgcctcctcccagttctcgctcaaacgtcaccttctccatgagtctcccctgagcactgagcttaaaattgcagccttcccctcacttttcctatctccttttccttgccagatttctctccagagctgggatctccattccccatactttgctgctttttgtttgtttgtttcctgtttctcaaggcatataaagctgcaggaatacagatgggattggatctgcggcacctaaaacaaatgctggataaacatttccagaatgtatgaagccactgagagtcctcggtgttggcacggttctccaccctgggcagggattaccgcatacgtggtcacccctccccagaaaggcagacactgtcattcccactgcttcacccccagttttcataaggggaacccaagatgcagagagaagaagagtcggattgaaaattgcagatgtgaagggagctgagcaggaaattcaggggaaagaatccagtggggtggagggagctgccagggacttgggacaggtgttcgtcttctacctcagtccacgtacctacatctatgagcagcagcatctcctgacacacctgccccacctcgcacgtctcggtattagatgtggcccaatcagtgggttctttactcaagttttcctgcttcttcaaggtggtcccccgatgacaggtcagaacatctggggagaggaaacccagggtctgtgtaagccaggaacccaccatgtctgtccctccacgtcctgggctagggaaggtgatcatgctcttgagtcacactccaggtgacctggccacggagtccctcaaccacggattcagaagggacttgggagtccaaaccccacccccattgttccctgtttctgcttgaacacccgcagggacgtcctctcacagccctgtgagaacagccattccttgcttcagctgtgagagcaatggaagctcttcctgagcctctgcccatctctgcttccccatctgagctttaaggtcctcatttcaataataaggaaggcagcctgagacctttctcatacctttcagttgcaaagccctatgttccaaacaagatgcgaagggccagggtgggctgagcactgccgctgagcactgcctctgcacctggctgacctcattgcttcccacagatccacccatctaaggttccagggaacacagcttatctgggatgcctcatttccccacagcaccccagcagtaggtggtgtgatcacaatcaacaccctcatttgcaacaagggaaacagaggcaggattgctcagtagctgcccatgccacacagcttgtgagtggcagaggtaggctgggaacccagggactctggaccctcagggtcggggttgggagcaggagggagacaggtactgaagaccatcctcggctaccttggccccgaggccctcaaggctctagtgtgaaaccacagcccctggcctcccctcacggccatcacagagcaggggggatcggtcccatgatgcagggactcttagactgagcccccagcttccaccaacacatgcgacctgcagaaccgatgccaccctggagggctgctcatttgcatacttcacagatgacaaaatcaaaatcatggctcctgctcccttctcccacccttctctccccactcccatctcccctacttacacccgtggcggctcgtttctgccagtctagctgaacacattggtgttgtccttgaccacgctctttctctcccacattgtgttcctcaagtaatcctactggcttgagctgcagaaaatcttcaaaacccaaccccacgtcaccacctctgctgcctccaagccccccgcttcactcccacctgactcctggggcaatccctgcacccgcctgtcactgttcctctcgctccattctccacccagcaggcagagggaggctaggtaaacctaagtcagttcatgtcactcctctgctccgaagactccaggaggtccccattctggagaataaaattctaagcccttccaatggcccgggaggcctgataagacgcggccgcctccctgctccctccatcactctgctccgcacaggtgtttctggcaggcactcacccacatcatggtctttgcatctgcttccgtcccatgtctgcaaccatcccctcctcttccccaaatccagggaaagaggctccatgagatatggagacttttgatcctcgtgtgaagctgaggctggaaagctgtttcggcggcagagctgggcctgggacccacgtgtccctgattcagacgtgggctcttccctgctctctcactgggaccgctgcccagctcctctaggggcagccagggccttatctgcccgggccccttggttcttcacaaggggctgctgccatggccccttttagtaacctgcatccttgcacccagccctcccactgctgcggcttcttataagcggttccatcaccctgaagcctcttctctcctgcacttggtccccaacgtcttgttgttcccccagtttctgatgcctggtcttgtgatgctcactgtctgctaaactgctgaactgcacttcaccagggaggcaaaacagcctgcaagatctggctccagtgttgaaagcagaagatgaatctctatgaacagcactgattggtgcatagtcgctgtgttttatgtggtgcgtttgtgtagtgtgtgcacatgcgtgatgtgtgcaggtatgtgtgctgtgtgtgagtgcgtagtatacatgtggggggtgtggttgtatggggtgtgtggtgtgttcatggtatgtttgtgtggtgcgtgcatgtgtagacatactgtgtgtgatatatgtggtatgtgtttgttttgtgtgtttggtgtggtgtgtgttctgtgtatctgtgttttgcttgcatgtggtgtgtgtggcatgccagatgtgttgtgtgtattgtgtgttgtgtgtggtatgtattgcatgtctgatatgttgagagggagagtgtgtgtggtacctgacgtgtagtatgtggcatacacactacatgtacacgtagtaattgtgcactcgtgtgatgcatttgtgtgtgttgtgcatattgtgtgctctgtgtgtgatttgtgttccataggtggtatgtcaggggtatgggggagtgtgtgtgtggtatgtgatgtgtggtgtgtatgtgtcatggtgtgacgcattcgtgtctgctgtgcttattgtgggctgtgtgtgtggcatgtgttgcgtctgatttgtttctgaaataccttctgggttatcagtgtcatctggtcccagagaccagggccagatccttaacagcagcatcagtcaaaaggaaagataaatggctcagaccctgccctccctgctccacaatcttccatggctcccctgccttcaggagagggtccacccctcagcctgggttttcaggtacttgagcgaccaccaggttccccacttaactcttcctcccccaccagtatccattctgaaggcatgccagttcatttcctcctcagcctcacacctgctgtgcctttggcttggagcagctccctcttcgaccccacacccaccttgtccacctggaaaacttcgaatcacccccaatcccagctgtaccccctcatcttgatgagtccttctcaggtggagtgagggactcttcttgaaaacagcaggctcactcccacctccaggcctatgcagctgctacacactgttccctctgccaccaatgtcctcttcctcttctaccaataagctgtaggtcatctttaacacacggttcacaggccacctcctctgtaaagccctccttgactctctaccccaacaacatcagtattttcctcctctgagctgccccaggccccacatccccgtttgccacagccctgatcacctcaagctgtgaccatctgtgtctgtagcacctccccctcctagtcctggaggcccttcaggtagaaacagggtctgactcatgagggagctttgctcaagtgagccctgcatgtcctcacttgagcaaacacctcctggtacccttcctgagccgtctcctgagctacccaaggctggaaaccctggtgccagtggtaccaagcccctagcctcaggctcccagcctagctagggagaaacagccaaatacacagaggaatgtgtgcagagctcacacaactctctcttctaagctctaagggttagcgtgatgtgggcagacaaggaaactgaggcaggggcagggaagactttgcttctaggagggaagctgggattcctataagacccccacctccccaccatggcttcctgttgctttggagcccttcttatggagacattccctggcactctcttccatggcagcacctaaatgggtaagtggggaccctctcagtgtcctcctttaactcttgctttctctgtcacacccaaagtccccttgattttctctctgatgttctctcctgtgcaggcaaggctgctggggcactccagcaccatgagcggggcgggggctgatacgggtgggagagaggctacggtggcctagggaagtgggagacctagggttacccaaggccaggggtgtggagacacagaaattgaagcaaccagtcactctcagcagcttgagagccagcaggggccccagcactcactgttgcctaaagccacatgccaagcaacccaccctgcacccttgaccttcctcctgctggctttggtgtgatggctctggatgccccatgtgtcatcgtgccccgaggctgcagtccagggcacagcctaggggcaggactcacctttcatatcgcagttctcagtcatacccacgggcccaatttcctgtgtcccattgagcaggttgcaaactggctggggcatgcatccctggactctcagattggagaagatgcctcctgcagaaagggggagcgagggagagtcagtgatgctgcctccaggaccacccaaccctcagaggcaggcatagctccaggaagccaggcccaccatcctctgggtctcatgccgtgcctcagctcaccctcactccccaaagactaagatctcagtccccagaccttccagttcagtccccgcagggaccccgatgtcccaggcttacctcccctgagcctgaggaggccatcataacagtgtgtggtccccttggggcagatctcttctgttgtcccctccagacagccttccatagacaagcagactgggcacctcaaggatcctgggtctagggaagtgacagacagagtgagggggcactgagacggcactggatttgatcagataccttctctgcaccccacttttgctggcctcaggagtcaacctgctcagccttcccaaaggggccttctgcagctcccatcatgggatctggatgtgggaaaataagtgtaacccatgaaagaggaaggcagagagatcaggaggtctgggtagaggcacccagggctgggtacagaaagtggtcttggctgggtgtggtggctcacacctgtaatcccagcactttgggaggctgaggcagatggatcacgaggtcaggaattcaagaccagcctggccaacatagtgaaactctgtctctactaaaaatacaaaaattagccgggcgtggtggtgggctcctccagttccagctacttgggacgctgaggcaggagaatcgcttgaacctgggagtcggaggttgcagtgagccgagattgcgccactgcactctagcctggtcaacacagcgagacgctttctcagaaaaaaaaaagggaggggtcttggggggcaagtgggggtggggggtgggcagggtggaggaggggcctgctgaggccaaatgtagactcagacatggtcaagtctgaacctttcaacaaagtctggccttccgaggggagacacagaagcagactcattggtcaagggaatgagggggtgccctggaacgagccagtgccttcacctgcaagtgctactaagcctccaagaacaggagacttctgtgttcacaagctgttccaataaaagaagcgcaaaatatctccctagactctttataacaccagacaaggaaagtggaaagttacagttcagtctcccttaggaagaggaaacagcaaaaaccctgcaggagaacttcttgaaccaaacgcaacagaatagaaaaggaatgcaggataacccagttaatggtaatttcatatcagaaatccgtcctgtttgctcttagaagaggaggggtgcggggattcccgggtggccgaggtcggtgggagggatcgggagtgagtggggagggatggaaaggaaggggggcggggcggctgccagggagcagtcaggggagggatggagcgagcgaggggcacgatagcgagcgagggtgggagggagctgaagaggtaaagagggtgctgtccctgtggcaagggtctcccattgttcaagggcaattctctagagaaggggcacctgtgagatgttttcagccaacaccagctggccaaggggatgtgggtaggatatgccttatccactccagagctggagacacactggattccaggggccagttcctaaccactacaccatgcctggatgcatgtgtgtcacttaatttcataacgtgaacagagtaaaaacaatgataaacacaactgttattactgatgccacagagcgccccagttaacagctccaaggcattcacctgcagcactgccggtactgggttttctgtttttttttcttctcttttctttgctgttaggtgcaacaatcgcagaaattccttcctcatcttggtcttgtagaagaggatgcaggagctgagagaggggaatgagcttgaccaagatctctgagtcaagctgtggtcaagctagaatcaagtctgggcccctcagccccctgcttgcggggagagaggggttgggagggacaagaacctctgatcccatgtgtcctcaaagcagtccaagggctctctgtttctttttgttccttttgtttctccttcttgagcagccaacgtgttccctaagtttgagaagcccagagagtgccagaatttgcttccaatgtttacctaccaaggacaaagccagattctggagcacctgggtggggctttttccatggagataaagactcccctgttgagtacaaatatttcctccatgaagatactcttgaaaacacactctccccactgagacttctcttcatgatatccgaaatgagtatttcccctgggggtttccccagctctgatccttacctctgtctctgtcctactaatcacctgggctgtgactgtctccgtctgtctctcaatctcaaattcctgaacaggacctcacacagggtctggtccacacaggagggtcagggagggtcaaggacctcctatcctacctaacttcaaagcattccaccagctatttctttttattccctaaatttttttttaagacagagtcttgttctgtcacccaggctggagtgcagtggcatgatctcagctcactgcaacctctgcctgctgggttcaagagattcccctgcctcaccctcctgagtagctgggattacaggcatgcgccaccatgcccagctaatttttgtattttcaatagagacagggtttcatcatgttgttcaggctggtctcaaactcctgacctgcggtgttttcattttgaaaactttcaggctgggcacggtgactcacgccagtaatcctagcactttgggaggtcaaggcgggtggatctattgaagtcaggagtttgaaaccaacctggacaacatggtgaaaccccatctctacttaaaaaaaaaaaatacaaaaattagcccggtgtagtggcagccacctgtagtcccagctactccggaggctgagacaggagaatcgcttgaacccaagaggcagaggttgcagtgagccgagattgcgccattgcactccagcctggatgacagagtaagactccgtctcaaaaaaaaagaaagaaaaatttcaaacctgcagaaaagctgcaaggatagtacagtaaacacaagtatccccttcactggattcacccactcttcacattttactgtatttgtttatacgcacacgacacatgcttttaaaatattcttaaattttaaaaacaaggagtagacattgtaactctcaccactaagtgcttcggcaaaaaccttcttaagattattcttaagggggctgggcacagtgactcacacctgtaatcccagcactttggaaggatcactttaagtcaggaattcaagaccagcctgaccaacatggtgaaaccccgtctctactaaaatataaaaattatctggacatgatgacacacaactgtaatcccagctacttgggaggctgaggcaggagaatcacttgaagctggtggtggaggttgcagcagtgagcctagatcacaccactgcactccaacctgggtgacagagccaggctccatcacaaaaaataaataaataaaatttttctaaaagtatagattattctttttttctctttccctcttttttttaggtgcagttttgctctctcacccaagctggagtgaagtgtcgtgatctctgctcactgcaacctccgccccctgggttcaagcaattctcctgtcccagcctcctgagtagctgggattacaggcgcctgccaccacgtccggctaatttttgtatttatagtagagacagggtttcaccatgttgaccaggctggtcctgagctcttgacctcaggtgatccacctgcctcggcctcccaaagtgctaggattacagatgtgagccaccacgcccagcctatatagattattcttaaggactttgtcctacgtaaccacagaccaggatcagacccgtgtagtttacacagatgcactgctgtctaataggaagcccatttccagttttcctctgttgtcccaatgacatctctcattgcgtttttgctttctgatcaggagaacatccggggtcaagcatgaactgcactgtgttgtctttatgaaagagaaacaaaaactcaggaccccaattcactgtgacagaaggaaaaaaaaaaactggaagctgagtcatgcaagaaactgcctttccttttgttcctaagcagacagctacagagaaacggctaagtatttccttaggtagctactccatgttcaccttatcttttttaaaaaaattttttaattattattttttttgagacagtgtcatactttgtctcccaggctggggtgcagtggcacaatcttcgctcactgcgacctctgtctcccgggctcaagtcattctgtcacctcagcctcccgagtagctgggactacaggcacccaccaccacacccagctaatttttgtgtttttgtagagatgggttttgccatgttgtccatgctggtctcaaattcctgggctgatgagatcctcccacctcagcctttcaaagtgctgggattacaggtgtgagccaccacgcccggccatattcaccttatctttctcaaggtgccaatttacccagcgtgagatgaatacgtgattgattattcccctacctcctgctttctcttacaccatgtggattcagtaatgcgaccacaccctccttctttcaccgccagccagcttttccaccctaaatattgaagccctcaaaattatctttggaaaaaggcacagaccacagactgtttctatgattgcatggtttttttctatgtccttaaccttggcaaaataagcttctaagttgatggagacctgtctcagataccttttggtttacatctcatctctggactcccctttaatctaggagtgctccccaactgcctttcattttctttaatgtcattgaaagcaatggttcactttttttttttttttgtaaagtcttccaccacctggatgtgcctgactcagactatgattagagtagttttaatgatttttggcaatattcttctagctgggtgtggtgtgtcacattcagaaggcctttaatgcctgtttgtcaaattcttggctaattaacaactgctgtgtgaggtaagccatggaggaggccgtgtgaatgtcctattccccaccacgagatccttctgtctccttgcacacattgtgcccaagctacttccagaaaatcctctgtgatcacggcaaatcacataatgtttttggtccagctcccctgctgccctcctatccactcttctgcccattacaggaagcctttacacccaggcagctcagcgtccagagctggttccactcatccccttcaaggagaggaaaactgagccctgggaaggagaagtaaagctggagtcacaaagccaggaaatggtggccaggggcacgacccaggccttataaacaacctgcactcttccccctgcaacacagcctgctgaggacgctcatcagtcatctcagtggttcacttccaatctcctcatctgccaagcacccagcatgttccagcaaagacaaattattcctatggcaaactgacctgcatgcagtttacaggactttatgttataaagaggagggatctatggcacttaatgaaaagttacacttaaagattttcataggcctggctgggtgtggtgtctcatgcctgtaatcccagcactttgggaggcagaggcgggtggatcacctgaggtcaggagtttgagaccagcctggccaacatggtgaaaccctgtctctactaaaaatacaaaacttagccgggcatgatggcatgtgcctgtaatcccagctactcggctggggcaggagaatggcttgaacccggggggcggaggttgcagtgagctgagattgtgccattgcactccagcctgggcgacagagtgagactccatctcaaaaataaaagaaaggatctttacaggccttcgtgtactgaccagaggagcaaaaatgaataaaaggattacaacatgaggctggcattgctgtgcacctatatccttgagtgctggtggccccatggattagatcaacaccttgaaagctaatttgacactagaccaacaaagtcctttgacctggagttccactttggcaaaaaataataataaataaataaataaaatccctaaagtgtataaagagaaaggaagttgtgatatttggaaattctgggctttgagtaaagagagtgatattctagacctgctatcatttcactattacctgaacaatttacttcctctttctagccttccatctcttcctgcaaaataaggcatggttttcaatcacttcaccacacaggaaaaggaaatagaaatagaaataaataaagtccactccaggagcagtggctcacgcctgccatcccaacactctgggaggccgaggcgggtggatcgctcgagctcaggagttccaggccagcctgggcaacatagagaaaccctgtccctaccaaaaatacaaaaaagtagccaggcatggtggtgtgcacctgtagtcccaggtacttgggaggctgaggtggaatgatctcttgagcctgggaagtggaatttgcagtgagccaaaattgcatcactgcacttcagcctggatgacagagcaagaccccctctcaaaaaagacaaagaaagaaagaaatagacaaagcccaatgctggcagtgctgtggaactaacatcttaggattggtgaagagagtggacatagcacttgtggaaagagccatatttcctgggggccataaggccacatatgccctgtgaagactgaccagggagtgttgggctgctacccacatttcatctatttgtcaggcaaaaatgctttaaagatcattccacttgattttcctttaaataaaaatcatgtgggaatggaatggaattgccgagtggcatggtgggtgtatgctgaaatttttagaagctgccagactgctttccatagtggttgtaccatcttacattcccaccagcagcgtgagcattccagtgcctccacatccttgccaacacttggcgtggtcactctttttaatcttagccattctaatagttctgtagtggtatcttattatggttttattctgcatgtttttcttgagacagagcctcattatgttgcccaggctggagtacagtgggcccatcatagctcactttctcttcaggaaagtcttccctgatctttcagtctaggtcagaagcccagtaatatacagtcatgaggccccatatttattctttttgtgctttttttgagacggatttttttttttttgcactccagactggagtgcaatggcacaatcttggctcactgcaagctccatcttccaggttcacgccatccttgtgcctcagcctcccaaatagctgggattacaggcatgagccaccatacccagctaatttttaaatttttggtagagacagggtattagcatgttgcccaggctggtctcgaactcttgacttcatcggtttcccaaagtgctgagattacaggcgtgagccacgatgcctggctcaaggttgactcttttttcttttttttttttttttgagatgaagtctcgctcttgtcccccatgctggagtgcaatggcacaatctcggctcactgcaacttctgcctcccaggttcaagtgattctcctgcctcagcctcccgagtagctgggattacaggcgactgccaccacgcctgggcaatttttgtattttttagtagagacggggtttcaccatattggccaggctggtctcaaactcctaaactcaagtgatctgcctgtctcggccttccaaagtgctggaattagaggtgtgagccaccacgcccggcctctttaatttcttaataggctcttccaggagttattgagaagaatattttacaattctaagtggaatattttagcaggaaggaccgtggtttatttctacgataattctgttgtggcttaaacagtttgttcttttgtaatttggggtattccctctaccacctattgttgactttcgacctttgatatttaccctatgtaaattcatcaacccctgattttacttcttcaaagccagcatgaggctagtcaagcctggtttcctctcacaggaagtcagtctttggccccatggtatttgtgtaaccaggttacaagatttaaaaatctatcgcaagtgacagtaattaaaaaaaaaaaaaaacaaatgtgggctactctggaagaagaaacattggaatgtagattttatttgtttaattgcagagacatgaaccagcttatactcgtttgatttccacattattcatggagagtctaaagtcaatttctgggaacaaaaaaccaacttgaaaagctgtttaaattctattagtgggacttccaaaggtacaagggttaagaaaaagagaggagaaaagagaaaagaggggtagggagaaaggaagacgtgacaggaatgtgagccagacaatggagatggagaaaaagcagtcaagagggacagagggcgcggtggaggtctgcaggatctgaagatccacctctcttctctggacactgacctcttacctgatcccagaaacagactgagctttaactctgaccacatactcctcagggtgatggagagtggggccacctgcaccctaccagccttccacagcccctctgcatgggctctgccccgcaccctacacgtgctctgaggcctcttattgcaacaaatgacttcctccggattccattccctccaccgcctctttcttctcgctcaagcatcttcaatggtctggatacgtttctttgcttccatttgtcgccttccactcactcatccatgtccacttccatcttcccctttctctaacattgcttgtactgagatcagcaacatcctgctttattgctaaacctgccaggaactcacaggttagttttgcatcctttgacgctgagggccacttcttttcctggaataatctctgtgaggcaaatatacatttttaaaaattttgtttagcctgttgcaaaaagatagagactctcctcttttcactcagatcattttctcttcattcattcattcattcattcattcattcattgatagagtctccctctgtcacccaggctggagtgcagtggtgccatccaagcttactgcagccttaacctcctgggctcaggtgatcctccctccttagcctcctgagtagctgggactacacgcatataccccactatgcccagcaaattgattattgttattgtgtgtgtggagataggatcttgctatgttgcctaggctggactttgagagcatttattttttagaagaggtgtaattgaaaattctttctctgtcccttgaagatgtatgtaaagctttctaaagcatacataagcatcttgcctgcctcacaacccagaactgtcctcctcaaggccataggagccctctctttgaaaggcaggcatccgggcagaaagcgcccctgtctcccagtttctgtgagaaggaaggaacctcagttctgggggcatctcactcccagttgcaaaactacctcctgtcatagataagagaggtttgtttttcctgtggataaagccaattaaccacacagagaatcaacacagttactgggtgaatttaggatgaactatgtgtgacaaatggtgccgttgagtcctctcaactgggaacgagtcaccgtgtatctggagaccatgtgtgtaacgggttgcacctgcttggctggatacaaaggtgggatttctttctgtctttgtcatctcttagcagattgtatcacattttggcttaatgcttactcagtcataagacaagtttcttttacttctatggatgtgaggggggtttctgggctgagcagaaatttgtttcttaatcatatttttccagcaacccccacccaacctaccccaccttctctgaagctacttcccccaggctttaaaggcggctgctccccggggttcctcccgggccctgcctctcctggttcatctgatctcccaccctcgaggcatcgtagcttccctcccttccatgtgctgatgcctctcggatctctaactctaggcagaaaccggcttctcagttcctcagctcaaatacccaccttgggacgggcatctgcaccaggacttcccgccgggaactctccaggtggaacacggtacatattctctggctgcagtgcagtttttaaatgccaccagtacacatggggaatgttctgtcttcccaaggaggaagccggaaagttcattttcccagcactctttgcaggagggacacagacacgggtccaggctttccccatcaggtgctcccgtgaaagactcaggatcccgaacagcaccaggaagcagagggtgcatggcaccgatttgctttttgtttttgttttaattttttgagtggggatcggggacagaagcttctggactccagggccagcctcagcagtgcagggtgcagggtgtggtttctgcctcctgcagtagccagaagatcttgaccggagctgtcctgtgcctgtggtttggtccttgccctgggccctgtggcctccaagctggcttcatgagggcccttggagcttggtgaccttcctaccctgtcctttaaccagtcccttttctgcttcttgctggagtgagctgggcggttttctctgaatctgttcctgtgctgggttctcccttagggaagggcaccctgggcacccgacccctcagccggatgcctagcagatgttctcatgcttccacttccttgcccctttatgtccagtggtcactcctttatgtcccttccatgtcctacatctctctctgctgtgtcctgtcttctgcaccctgtggcctccacctaagtttgcaccaccacccattcctccttgaatgaatacagttgtctccccgggtctccctgtctccactggggccagcagcatccgagccagcttcttctctgtggcagagatgatctttttcaggcctcctccggccatggccctctcctgcttctgtttccagagctcccaagtccctgggatgtgctccagctgctaagagaggcctcgaaggttgggtgatgtggcctccactgtcctcctgagcaaccaccccacctaccctcatccttcagctccattacatttcctttttctgtttaattttttgaataggtgttgtatttagatggctcagaaatttgcatccgtgtgtatctgtgtatgtgtgcaggcatgaagagcctgtgtctcatccctgttccctatgcacccaggtcctagccccacgccagacccagtagccagctgtgctgttcatgacctgcaaagctttctacagctgttttatgcaaaacaataggaattattgtaaattatggtaaaatatatataacatagaattcaccattttaatgacttttttcttttcttctcttttcttttctttttttttctttttttttttttttttttttttttgagaagagttctcactctctcacccatgctggaatgcaatggcgtgatctcggctcactgcaaccttcacctcccgggttcaaccgattctcctgcctcagcctcctgagtagctgagactacaggtgcatgccaccacgcccggctaattttttgtagttttagcagagaggggatttcatcatgttagccaggattgtctcgatctcctgacctcgtgatctgcctgcctcgacctcccaaagtgctgggattagacgtaagccacctcgcccggcccattttaaccacttttaagtgtacatccagtggcaggagtacatttaggttgttgttcaacgaccaccactgtccatccccacccagaactttttcatattccccaactggaattctttaccaattaaacacaactcctctttccgcctccctccagccactgacaaccaccttttcattttctgtctatgcatttcacgacgttaggcacctctgttaagtggaatcatgcaaatttgtctttttgagtctgattatttcacttagcagaaagagctcaaggctcattcatgttgaagcaccatcagaaccacccttcttgttatggctgaatcccattcatttgtacatatagaccacgttttgcttattcattcacggatggatggacactgggcttgtttccaacttctagctattgtgaataatgctgctatgaacaaagacatgcaaatatctgctggggcccctgctttccgttcttttcggaatataccagaagccgaattgctgcatcttttggtgagtctatgattaattttttgagaaacgaccacagtggttgtgccatattacatacccacaaatgctacacaagcgttccaattcctccttgccaacacttgttcttttctgtttttcttttttttttttttttttttttttgagaacaaccatcgtaatggatgtaaggtggtatctcactgtagttgtgatttttattttcctaatgattagtgatgttgagcatcttttcatgtgcttattggccatttgtaaattaattttacatttcctcctttgtaatgtaagaggtagcacatggtgcattgttctgcttcttgtttttctcactatacggtgtatcttggaaaccttcccgggtgcacagacagaaggatacctcattctttgccacagctgcccagtatccatgatgtggatcatggctcatgacccagttctctatggataaacatcagggtcgttcccggtctgtggccatcgccaacactgccgtgactagtctagaatgggtgccatttcatgcatttgcaattcccagaagtacactggttagtcagcaggtgagtgcattggtgagaggatgtgactgcagtctcaggaaatatggaaaccttcttccctttctagctgcagcacccccagtctggacagcatatggaaagcactgaggggaagccccactaagcacagaaccctgctggccacccaagacctcaatacagatggacaacatgaagcccctggcttaggggaaaacagagagactgagaaacacacagagagagttggggcagggatggagagagagagaaaatgataaagacccagagagagacagagtcagagaaatacaggggtggagaggggagatacagagagagacagagagcaaaggggacagagacattaacacagagagaaggagggagaggagaggcatggagagagggagaactcaaagagccagagccagagaagtagaaggtgagccatagagagattcagggcaggactagggtgagacaagagaggacccaggcttgtggattcttgattaaaaatcaatggtgttataatccagaaaagagagagtgaggggagagagaaagggcctaggactaaaaattaaggggtcacttgcgcaaccccggatttgggtgtctccttagattttgcagcagagacacctcacttacctcaccctcatccttgtcctgagacccccacagggacacagagacacaaggaaaacacatagaaccaaaagagcacccaagaggaggaggagggacatggagacaccacgatagtcaagctgatggggccacacaaaatcagaacagagacaaagagggaggcacagagagacacagagggaaagagacccagaaaaagagatggacagagctggagagatacagagtgagagacagacagtgtgcaggaggaaggacactcataaatacacagaaacagaaagaagaggctggagtggtggctcacacctgtaatcccagcattttgggaggctgagacgggtggatcatttgagattaggagtttgagaccagcctggccaacatggtgaaaccctgtctctactaaaaatacaaaaattagccggatgtggtggcacacacctgtaatcccagttactcaggaggctgaggcaggagagtcacttgaacccaggaggcagaggttgcagtgagccaagattgtgccactgcactccagcctgggtgacagagtgagactctggaaagaaaagaaagaaagaagggaaggaaggaaggaaggaaggaaggaaggaaagaaagaaggaaagacagaaggtacccattggtagagagacaaagacagagacagacagggagacacagagatgaaaagacacaaagtgagccacagacacacagtgaggaggagacagagccagaaacagagacccagtgtgatggaaagagagagaggcagacagacaagagcagcatcttcagggcgacccaatgcccagtgcccctgagctgctccacggggagggggctgagcgcacagcctgcatcccatccatcgtttcctggccttcgtgactgggtgtccatgcacaatccagtccctgtctctgaacctcagtttccacactgtaaaccaggcatagatacaccacctcaagggtggtggagagggctgggctggctgtttctgcttaatgcaccctcatgtttcataaaggaccccatgaactgtgatgagagtcactgttcattatcatgatggcttccagtacttacagcagtcagcactaatatcatgcacatcatcagcacttggcatgaatccccattcattacagatcagcattaattgagttgatgctctgtgcccgatacttgtacactcataacatggattgttaatttaattgagacaaccacagtctgaggtcagtgatatcacgatcatctccactttccagagaggaagctctgctggtaaggtgcggagcaggggttcaaacccaggtggtctggctccagggccaggtgtgcccaggagcagggctcttcctgggtgtccaaggccaccttgtctccaggagtgtaaccgtgtttccagccactgaaaacttggattaaagcccaaagtaaactttcccttttctggctttgaggtgtggtgtttaaattcagagacattctccaggaaagcagaaacttcttggctaaaatccaaacctagggaatttattgcagagatggggacgtggttctcatttctgcccatctcagagtacagattaattaactcagaagattcaaaagattatattttccatattccttgctgaacataatattatacccttttctctccagttttatgcttctttttttcttggtgctaaagaaattgtaaacctttgtcttaaaactggagtcccttccaactgctggtgacagaaatcccagcaagataagaaggagcaaatgtccccgcttcccagacaacttgagatgtaagcagatcctattcagcatcctacaatgttcttgcaaagattatttctgtcagtggagctctgtaaaacacccagactccagagaccatcacttggtcctgtgaaggtaccctcttagccttcaaatatctgaaattcagatgaattgcctgacttacttttttttttttttttgcaacagagtctcactctgtcgcccaggctggagtacaatggcgtaatcttggctcactgcaacctctgcctcccaggttcaagcgattctcctgcctcggcctctggagtagctgggactacaagcacgtgccaccacacccagccaattttttgtatttttagtagagacggggtttcaccgtgttagccaggatggtctggatctcttgacctcgtgatccgcctgcctcgacctcccaaagtgctgggattacaggcgtgagccactgcacccggccttacttacatttattaattcaatgcccaggacataatgtgtaaatggacaactctgttgtctagaatttatgcaaatacttgtgatgtttgtttgtttatctggaaaatggcttttcagggaggaaaagcttttcctctacccacttaggttcagtatctggggtcttgtgaattttactaacaaaagatcaattttaaaaaggcacacaattttcattaatatttacatgcatgggagttcacagaaaagaagtgaaactcaaagaaatggttagacttgtggggcttgtataccattttaacaaaggaaaggggtttgttcttcaagggaaggtccatcatggggaagtgacctagaaatgcctgggaaactgatggagatgcagggtcttttagtgaggtctgtctatgcacactcatctcagtctccaggatgagctgcctttctttatcatctgggtagaaaacaccttcagaaaaggaaatttatgctctctgcttttaggtagataaggggagggcagacctcttcccgtatctgttgattctcaaaggccttaagctcaaaataatccttatacaaatgtggcgaattttggggtgacttaacttgatccctttcaggccactgatgagtccatctttccccacccaggtggaggtaagaaaaacctgtgatgtggctgcatggatttcttatttaaatttagagtgtcactaacaaccatttatcaattcattgggcactccctgagcccctgctctgtgccaagccctatgctgaatgatactgagaccccaaaatgaatgagacccatccatgctctcaaggacctcccattcccaggaacggcacagacaggacagggtgctcagacccataagagggtgtggtgactctgaactcaggtaggctgaacgacgcctctcagaactcccttccctgtaggttcctgttaggttgggagcaggacacacctgcccaaagcagctgccgttgtgcatttcatgctggggaaatccaggcaggagcctccgtggctcaggtccaggtgttgctcatctgctagctcagctggtcagcctggagcagcagcaggacctgaaactgctccacctttacgccaatcctccttcagcttctccacctcctgagccaggtgtgcattgagctctgtgacaaagttcactcctgcaggtcccctgcaccaccaagatgaggcagcaagaacagaggtaggttctgtgggtcccgaaaccttccaccttgtgtaaactcccggcctgcccttactccccactttccatccatctccccttccccagggcctgccctgcagacttggagctcaggtcagatgcagagcccacagcctcacaggcttccatcagccagaaatgggatcctgacagattccaccagcaccaagtggagagatatttaggtatttaggggtctgagtgaggggcaaactggcctgcctggggcggcagggaaggtttcctagaggaattcctgctattcctcattgcgcttccaaattttagtcgtgttccacttttacgatctgaatagcccttgcactattatttactcaaaaattttccttaaaacaactcactgtttttctgtagcctcatcttaaaacaataatgtttatctaatcatgggattaatatgatatttccaattcttttactctaataggcgcttaatcacaagcatagcctgtaacgctttttaacaactgtcatgtgtaaccccttagaatcatctcacatgccttccaccactgacacctgaaccctattttgggaaccactcctttaggtgcatcctgaaggaggaacagaggtttacatggaaccaaatggaggaagggagttttgtgctgagagagcaggttaaggagtttcctagaagatgtgacagaagctgcattagttatccattgttgtctagcaaattaccgcacggcttcggggcttaaaacagcaacagatatttgttacctctcaaattctgtggggcaggaattgaagagtgttttcagcattttttttttttttttttttttttttttgagacggagtctcgctctgtcgcccaggctggagtgcagtggcatgatctccactcactgcacgttccgccttccgggttcagggcattctcctgcctcagcctcctgagtagctgggactacaggcacccgccaccacacccggctaattgtttgtatttttagtagagacggggtttcaccatgttagccaggatggtctcagtctcctgacctcgtgatccacccatctcagcctcccaaagtgctgggattacaggcatgagccaccgcacccagcctgttttcagctttttattatgaagctgggtgattgtgacttggtgagtctcatgaggttggagtgaagacgctagccaggtgcagtcatctgcagctttactgggcctgaagggtctgctttctagaaaggtcactcacatggctgacaatgtggtgctggctagttcctacctcagggcctttgcacttgctgtcctgtgcctggggtgtctttcatctactctttgtataactggacccatcccatccttgatgtctttgcaccaatgccaccatccatgacctctgatgccaccaagttactttcttacacatcatcctttgttttcaactttttaatatgaaagatttcaaacatccagaaaaattgaaaacataataccaagaatacccacatcctctccttatattcaagtttaacattttgccatatttcctctggtttttttctgaaccatgtcagggtaaattgcagacatcaagacactgtgtccttgagtactttagcatgcctctccccagaatgactagcccacaataccgtgatcacgcctgagaaaatcaacaataactccctaacagtatctaatacatagtccattttcaatcttcaccattgttctgcaaaatatcttttccatgtatatatatttttatatatttatattatataaatataaatatataaaaatatatattttatataaatatataatatatataaatatataatatataaaaatatatattatatataaatatataatatataaaaatatatattatatataaatatataatatataaaaatatatattatatataaatatataatatataaaaatatatattatatataaatatataatatataaaaatatatattatatataaatatataatatataaaaatatatattatatataaatatataatatataaaaatatatattatatataaatatataatatataaaaatatatattatatataaatatataatatataaaaatatatattatatataaatatataatatataaaaatatatattatatataaatatataatatataaatatgtataacatataatatataaaatatataatatatataatatatataaaaatatatatttatatatacttttttttgagacagagtctcgctctgttgccaggctggagtgcagtggcgccatcttcgctcactgcaacctccacctcctggattcaagtgattctcctacctcagcatcctgagtagctgagactacaggcatgcaccaccacgcccagctaatttttgtatttttagtagagacagggtttcaccatgttggccaggatggtctcgatctctcgacctcatgatctacctaaatgctgggattataggcgtgagccatcatgcccagccccatgtatatttttaaacggggatacaatcaagactaatgctttgtatttggttattaagtatctttcattctacaacagtccccctccactacccatttttttcatgactgctaaagaaaagacagaaggcccaaagtggagtcaacttatgctaaagttgcacatcatcaaactgaaacctgcgttgtttactagtaagatacgtccttccagaaatcatgagagagattatagccaaatcccattaagccaacaagattttgctaaaatccctataaagggaagtaactttgagatgacagattggctattttttccttgttcctgctttctttggcttttttctgcccataaaactcaccaaatccctttagctcaatagcgctccattctgttttatagattgaatgccgcctagttcatgaattgctaataaaagccaattcgatattttactctatttgctgaaattttgttctttgacatgacatagactgtgaggagagcagacatgttgtcttatagaatgcccacattctgaatttgtttccttatggtgtcatttcactgacttcactctaagccctctattctctataaatctcaaagtgaatcccaaagcttgagtaaattctggttgcattttttttaggcaagaatacttcatgagtgatgctatctacattatattggattatatcaagttgcaatagttatatagctattattcctgtgtgatatttcagtgacttaaagattgatccatgggttcaggtgttgtcagcctgattcgtgtgttgtcaagttgcccatcaactttttgcttgatggttttagaatgatctaggcaatgatgatgatcattgcctagatcagtcatttcattaagcattccaaaatggcaattatctaatttttaaattcctcctgcatttttaaaagctagacttatttttctctaatgaagaaaacttcctcactcgtgatttggttaccttgaagtgttgtctgtttaggaagttactgtgatacttgattattttccttcatatactagctttgtgagctagttccctagcaacctccaaagtaaactgatgacattttaaaagtattattatgaaatatagatttttgtatattttaagtgtttcaatccattgcatccacactttcttttgatgctcgaaatgtcccacctttgtttgaaacagcccctccaagttggctcctatgtcctatttttttttttttttttttttaaagacgaagtttcactcttgtcagccaggctggagtgctggagtgcaatggtatgatctcaggtcacacaacctccacctcccaggttcaagcaattctcctgcctcagcctcctgagtagctgggattacaggtacaagccaccatacccagcaaatttttgcatttttagtaaagacagggtttcaccatgttggccaggctggtctcgaactcctgacctcaggtgatctacccgcctcagcctcccaaagtgctgggattacaggcgtgagccaccaagcccggcctcctatgtcctcttgacatgacccttgtagtatatgataatttcctgctttggcatggaaaatatcccaggctcatcttacataattcttacttcatatctgaaatcaggcatgtctccaaggagtcttggagaagattcatttttgtggggagtggtatttttagagactacaatttaaatactaagggtgctgtttgctactgttagcagatacagctagaaaaagacatactttttagaaaaagaaatgcttttcctgagttcacactagtatttcccatgcaaatgaaagattcttgggttttcgtttaaatgcattggtttcatatttgtatctcttttctctggccctgatgcataattacttatttgctatttgtttcaaaatagtcatgcagctgtttgcactaagaataacagtactgaatgcagtttagatttctttcatttatttcaatcagcaagatctatctcactagagttgtccagtcattgtacacaggtaaagtagctggaaataattttcctctgtgttactatgccaccagctttccacccagattcatttccaccagtttagttttcacttttagagatggcttagctcttgtgttttaaattttattttgtttttaataaggtaaaatatttacctggttacacaatcaaactattaagcaaaaggcttaatggtttatgttccatctcaggcccctttttttccctccctcctcctataggtgaatcagtttggttttgttgtttattcttccactgcttctttcaaaaagcataggcaaatatgtttttttaaatattttaaaagtttatttgtcttttaactagcccacagacccaattctttgagggctgagctgatttctgacacatgttctataggccctcctcttggaaacttactttctatccccttccaaaaaagtctgcaccttccatcatgatgcacattttaagttaaaattgccaatccaagcctcaaaatgcaagtttattgaataaagctgagaagagcagtaaacagacaaaaaaatgcatccacctaaataaaaaaattcacatatttacataattcagtaactgttaaaagttttcacacacagaggttaatgcacaggaaaatgctggtaatagcatctaggtgtcttgaaacgctgaaagcaatgtatagacacacaaacacattaaggtttaggtataggtcaattaacaaacctatacagtcctcacagagtcacacactctagttccaattcctccttttaggcacaagcaagttgtcacattctttgtaatggttcactttgaccattaatggtattgaacaacagcagcaagtttaaataccctttcatttacagaaccatccatcccatcagggaaatatgcaacatgcttcaaagaataagaagagaactttgggccaggtgcgtggctgagggccgggagtggtggcttgcgcctataatcccagaattttgggaggccaaggcaggcagatctgaggttgggagttcgagaccaacctgaccaacatggagaaactctgtctctactaaaaatacaaaatcagccgggtgtggtagcaaatgcctgtaatcccagctactcaggaggctgaggcaggagaatagcttgaacccgggaggcggtaagctggagattgtgccattgcactccagcctgggcaacaacagcaaaactctgtctcaaaaaaaaaaaagagaaaacttaaaagcccagattctactcataaaaatacgaatggagaaaagcaagtagtgtctgtgcaacacagtgcagtatattgtacagaatatttttaaggccacggcagtctatgaattaaaactggtattcattaaaagaacttactgtagactaaactctgagtgctcaacacgtttggaaatgcagtctacataagtgctgcttaacaaaagaaaaaatcacacgcagtgtgaggcaacacataagcgggtgtcccatagtgtttaagctactacagtggtctatatgaataataatttacaactgaaccagtatgaatatgtccctttatgtatacagaagtcactaaactacaaaacatgttcatttgaagtttttagacatctctgtatcatagaagcaaacgaacagcatcagttcctcagttctctgtgtgattgattattaacctgtagatgttgaacatgattacattagattaagcaggcaggtctagagttgtcacaataatcaagatgtctaatggcaccagtcaaaagagtgccaaaccttacatcaataaaagagaaaaataaaattttgtatttgtttataagtatcttttgtgctgaaagtcaactttatggctggatgtaaaaagtcgggaattacagtgtcatgcagcagcactggtttaatgactggagatagaacaaacagatgtttgaactaaatctgacttttttttttttttgagatggagtctcactctgtcgcccaggctggactacagtggcacaatctcggttcactgcaagctccgcctcctgggttcacgccattctcctgcctcagcctcctgagtagctgggactacaggcgcccgccaccacagccggctaatttttttgtattttttagtagagacggggtttcaccgtgttagccaggatggtctcgatctcctgacctcgtgatccgcctgccttggcctcccaaagtgctgggattacaggtatgagccaccgcgtccagcctaaatctgacattcttaacagtttttattatattgggtggaatgctctaaattcatgaaagcttttgagaaaatcttcaattcttaaccccttaaaaaagtatgctgaaccagaaagaaaaaacaaaagatagaaataatgatctggacagatgcaaaacagcatgcgttagttcctcccatatcccaactgccatctggcgataaagagttctcagaaagcagaatgtctttaatatccctcaggtaggatctcaccagtgtaaagaatcaacattgatctggtgcctccactcactctctgtggaccgtattggattcctaagatgtaattatacatttcacatgcatttgtgagataagataaacattatgtttacatatatcccacctgagtcattcaggcttaaaggttttctaaatactgtgtgcggcactagaaacttcatgctgtatcagtgaattatcacaaggacagaaaaccaaacaccacatgttctcactcataggtgggaattgaacaatgagaacacttggacaccggggcctgtcttggagttgggggctgggggagggatagcattaggagaaatacctaatgtaaatgacaagctcatgggtgcagcaaaccagcatggcacatgtatacctatgtatcaaacctgcacgttgtgcacatgtaccctagaacttaaagtataataataatttaaaaaaggaaataccaatattattagcctttaaccctaattcagaataaactaaatgttctaattgattttaaaaaaaaaaaggaaaaagaaaaagaaacttcatgctgtatcaagtcaatgtcagtattaagctactggactctatgaaatattatagatagacatttactgaaaaccaatataaaaatctggcccacaaagaccagaatggaaatatccaattttcttgatttaagatggtcaaaaccatcctggctaacacaatgaaaccctgtctctactaaaaatgcaaaaaattagccgggcatggtggcgggcacctgtagtcccagctactcgggaggctgaggcaggagaatggcatgaagccaggaggtggagcgtgcagtgagccaagatcacgccactgcactccagcctgggcaacagagtgagactctggctcaaaaaaaaaaagatggtcaaaagtgtgtgggtttttttttttttttttggaaaaaaaaaaagctctacacatgatttaagacaggtatgtgtaagaagcctttttgtgtgtgctggctttatcacgacaactctggctgattctttatgaaggattagggatactcatcttcagcagtgcacgtgagaagtaaactctgaaaaaggcaatttcttgggtttaggaaggactgtattctgggaattacttcagaggaatgggcaataattctaggattatacccaagaaggactggaagccttcaggagatgcttcagcttcttctagattttgaatgctcaataagccactgaaatgtgatatctatattatattacatatgtttatgtattagcatttcacccctctttggaaagggatagcattttaatatataatatactacaatttgtttgttatcttccaaccttttattttgaaagttttcaagcccatagaaaaggtggaagaattgtacaatgaaccccttatatatttcaccaagattcaccaattgttaacattttgccacatttgcttgattgattttttaatttttttctatcaatctagatacatgtgtatgtatgtgtgtgcgtgtatcctaattatttgcctgtgtatacacagaaagaaagaatgaaaaatatacataataataaattatatatatgttaggtgaatatataaatatatatatacttaagttgtgtgcactttactctgttttttatgtcataatttaaaattttaaaatatataagaaataaataagcctgaaacaaaggtattttcagcaaaataaaaatagagacacttcatcaacagctgattcccactgagacatatatttcagaaaggagagaactgatcacagatagaaggtatgggacgcaaaaagtaatgaagagaaaagaaagtggcaaatacacgttaaaatgtaaatgtacttggtataaatagtgctaatgatatctagtgggattatacaaagatacactaaaaattccctgcaaggttagttagtatgtaattcagggtgagtaggcaaattggtgaagctaagtaaatctaaggtcattttattattcaggaaaaaggcaaaggtttaaattgactttagactttgataaatgaattatgcgtgctggaatttctagcctatttcccaaacaaagattatcagagtggattaggaaggcaagatctggcctggtgtggtggctcacacctgtaatcccagcactttggggggccgaggtgggtggatcacctgaggtcaggagttgtctaccagcctggccaacatagtgaatataatgaaaccccatctctactaaaaatacaaaaattagcctggcgaggtggcacatctctgtaatcccaggtacttgggagcctgaggcaggcttgaacctgggaggcagaagttgcagtgagccaagaccatgacaagaacaaaactctgtctcaaaaaaaaaaaaaaaaaaaaaaaaaagaggcaaagacaaagacaagatccaataataaattatttatttaaaaacacatctaaaatggaaggaggttgggtgcggtgactcacgcctgtaatcccagcattttgggaggccaaggcaggtggatcactggaagtcaggagtttgagaccagcctgaccaacatggtgaaaccccgtctctagaaaaattagctgggcgtggtggcatgtgctgtaatcccagctattcgggagactgaggcaggagaactgcttgaacccaggaggcggaggttgcagtgagctgagatcgtgccagtgcaatccagcctgggggacccagcaagactccatctcaaaaaaatacgataaaataaaatggaaggatacacaattgttgactataaaaggatgggaaaagatatttcatgtaataagaaagccagcatataagaggcaggaggatcacttgaggccaggagtttgagaccagcccggacaacataaggagaccctgtctctacaaaaaaaaaaaaaaaaaaaagccagatgcctggctcacgcctgtaatcctagcactttgggaggcaccttgggactgttgaattaaaacaaaacacagcttaggctgctgtgggtattgacgacttgtgatttctgtgcagggcactgaatgtcaaagtgaaggaattcaatgaagcccggatcaagggcaggagcaaccgtgaccctcttaaaagagccaatgccccatgtaattagtgacgcgcgcgaatggatagacgctattcccaccgtccctacatagcatccagcgacaccacagccaagggacaggcttggcggaacctgcgggagagaagaaccctctgagcctgattgaaaggcggtgaagagacaggagagggggatcggtgggcggtcccgcctccatcttcagttcccgcatgggggcgaggcaggtacatgggccttgcgggctgtgggtgaaattccattattaattgttttttcactaacctggtgggggagtcgggcgcgagtttcgagagagactctggcttctggcgccaagccttagccaagctcaccaggggcagcgctagatggggagactgggacacacgtctgaacgcagatgtccgaagggagcgcaggaagacagaagcctcccgttgggcaggagggcaaaagctcctgggtcttggatttgcaacaggagttcagacggtgaaagcagggcctcaggatccttctgaccttttgagttttaaacaaggggtgtcagaaaagtcgtcacagggataactgatttgcagcaggaaagcattcataggaatgaggcttctttttgttttttgtctttgttttttgtttttttttttttttttgacagggtctcattctgtggcacaggctggagtgcagtggtgccaccattgctcactgcgctatgtgagctatgtgatcggcgcttaagtgatactctcgcctcagcctccaaaataaatgggaccgcaggcctgagccaccatgtcctgtggctttttaatccttttgatccttggatgtgggctcttcctatcattggaagacagaattcaccaaggttgggatgttcacccactcagaaaacctgagctggggctggggctgtggctcacgcctataatcccagcactttggtaggccaaggcgggcgaatcacctgaggttggaagttcgaggccagcctggccaacatggtgaaacccccatctctactgaaaatacaaaaattagccgggcgtggtggcgcatgcctgtaatcccagctactcgggaggctgaggcaggagaatcacttgaaccagggaggcagaggttgcagtgagctgagacggtgtcactgcactccagcctgggcaacaagagcgaaacttcgtcaaaaaaaaaaaaaaggaagaaagaagaaaaggaaagaaaagaaagccggagctgggattagaccatgtgagacaggttgatttcacgctagtgagcatgcgtggttgccatggtgctcttgcccagtaccacaggtccccaggttcagacgtttggtgcctgtgcttggatgagggaccactgggctaagctgccatccgtgggatgctgactaaaggcctccaagtcagaatatgcccaggcagaactatagggcagcgccatgaagcctcggctggcctgggatagccggtcgtcgccaacaggacgcagtgcagcagggttgaggccccatgcggagagctcattgtcttgggaaaccggcagtgggaagggtggccggcccctcgcccttcacgcaaggcccattcgtggggaacctggcgctaaaccatccctagaggagctgcttctgggtccgagttttctctgcagcagagtggctccctggatgggatctgttgaaagttagccctccacacaggcgtgtgtccgcttcgcagcgtgtgtgcagagccatcaatccttccttcctcaatcccgggggtctcccgcgtccccatacccccaccccggcctctggtatgggaaccagtgacgtctctcccgtgagcctgcccgagcccgcaatgccctcaggaggcgcccgccccgccctctgggctttccgagggctgcaaggaacatgcgcttccgggggtggagaggcggtgagggccgcccccgcagcgtcctgtttgggagccaggtcttctcctcgttctgcccgggctcgaccaggggctagatcggggttcggggagcgaacaaggcacgtcggagggtggcccggtggcccctattcgaggggtggctgtgggccaggaggtagcggtggcggcggcctcgcctgtggccatctgagccgtgggccggtaggcggggaggagaagagggtccggccggtcaccgcccttgcacgcctcctcctcttaaaaataaataaataaataaatggcgagttgggggtggacagggatgttttagtgctgtgcgtgcgttctggagccacaccaccctctagaaccagggccacaaccacccgtgacgcccaccgtgagaagtgccctctcccagaagggcctgcaccagagaccttggtctttgttctttttggagagatctgtgcagatcgaggtcactccagccctggattcagggagggctgcactatcagagaaagacagcttcagcgaggcctcacagtgagtcagaccagactcttcccatccccaagatccctggactatggggcatcatcctgggatccctaaggtcacatgggaaacttctcaagcaccgatgctgccatctgatactgtggcctgatcccacccctggacacctggaaattctcatgaacccgtggaggcctggtgctacctgaaactgtgacctcattctacttccaactcacaagttgaagcgtagatttacatgcagtcaaatcaataattagattaattggctgactaaaggaaaaacttcagacacgttaaatttaacacagtttaattgagtaatgaatgatgcattaatcaggtagcccccagacccagagtaggttcagagaaacttcagggtgttccgtccataaatggttggataacatctaccgcagaagaaagtgatgtagaagaaactaaggaaggcactgaaatagctggactgctaacagttgggtgcttgccttatttgaaccaggtttgaacagttagttgggtacctgtgattggctgagactcagctatttttactatagcaggttacagactgtttacacatcaagttaggttacagttcactatgtatggagaaaccattagaccaaacttaaagtagtagggaggcagctttagacctaacaatgttaacaggccaaacatttcaattaaggggtacagattggtcaaattgcataaaaaagcaatacccatatatactgtctacaagggaaatattttacatatagggaaaagcattattgaaagtgtgagtattgaaaaagatataccatgcaaacagtaagcacaagaaagttgaagtactagtaaaaaaaaaaaaagaaagaaagaaaatagaattcaaaacagaaggtaaaagagactgaagcaggagaattgcttgaacctgggaggcgaaggttgcagtgagccaagattgcaccattgcactccagctctgggtgacagagcaagactccatctctgtggaaaaaaaagaaaaggagaaacaaatgtgagtgtaagcaaggcgagtgtttcctctatgattagtaattagcagtcttcaaaaagacattctgtggcttggggtttaatagtaaaataattagctggcatggtgacatgttcctgtactcccacccaagaggctgaagtgggaggattgtttgagcccaggagtttgaggctgcagtgagctgtgattgcaccactgtactccagcctggacaagattgagagagatcctgtctcaaaaaaaaaataagtaaaactggtggtttaacctcaaggcttacaactcattgttttgtaaggtttgcagaagatctcaatcctttacaagtaggaaggaaaagcctgttggtttgagagggaactgggtgtgtgcataggcctgttggtaggagaactggagcactcaaaaagggagctgcacgatgcttatgccggcttcactgagggctgtgggcattggaggaatgggctttgaaggacaattaggagtttgtggggtaaacaaatgcatgggggaagcggattagggagaggtctcccatgcagagggaccagtgtgagcaaagccaaagaggctggaagagactagggatgtcctgggaatagatattagacagggaatgataagggtgaggcatgggggctggtctccaagaccagtgtgggaggttggaattttcccccaggaatacaggaagcatggaaaaaattctgaggatggaatacggagggcctgaggtatgtggtggctcactgttgtgtgtttctcatttctggatctaagagacattctttaatccagcaaatgtttacttacctacactgtaatcatatgctgagtacacagagatggatcagacacagctggaaggaaccagatacacacatgcccatgcacacatgcacactgacatgtacaccgagacacacacatcagacacacattcacacacagcacacagatacacacagacatacatatatacagacatgtgcacacacaaacatgcatgcactcacagtcacacatgaacacacatagccaattatactataaagtacaaaaaaaaaatttttttttgagacagggtcttgctctgtcaccagagcaaaagctggagtacagtggcgttatctcggctcactgcaactgcaacctccacctcctgggctccagcgatcctcccacctcagcctcccaaagtgttgggattacaggcatgagccatggcacccagcctagaatcttacttgaggtaaaatgagaatccactggaaggttttggtttttttgaaacagagtcttgctctgtcacccaggctgcagtgcagtagcacaatcttgactcactgcagcctccacctcccaggttcaaatgattctctcgctgcagcatccagagtagctgggattacaggggcgcaccaccacgcccagctaattttttcatttttagtggagacagggtttcaccatgttggccaggctggtctcgaactcctgatctcaggtgatccaccacctcggcctcccaaagtgctgggattacaggcctgagccaccgtgcctggcccattagaaagttttaaacaggagtaatgtggtgtggcttgcaattaagagatcgctctggtgccaggtgggaaatagccacatgggcaagggcagggcgtactgcaataatccagtgaccaatggtggtgtcacaagtgcttatataaaaagatgccttcactgtatattagccattgagcttttttcttttttacaaacgttccatggattcataaactatttgccaaccattgctctagactaacctcctcattttcttttttttcttttttttctttttttttgagaccaagaccaagttttgctcttgttgcccaggctggagtgcaatggtgcagtctcagctcactgcaacctccgcctcccaggttcaagtgattctcctgcctcagcctcccaagtagctgggattacaggcgcgtgccaccaggcctggctaatttttgtatttttagcagagacagggtttcaccgtgttggtgaaggtcaggctggtctcaaactcctgacctcaggtgaaccacccaccttggcctcccaaagtgctgggattatgggcttgagccactgcacccagcctaacctcttcattttctagatgaggacactgaagcttggagaggaacagaaattggctcaggctaaggaagatctgtcaatctctcttgcaccaaaaaggcaaagccacctttctcaaggggctgtgtattggggtgttcttgcactgctataaagaaatacctgagactagaagtaatttataagaaaagaggtttgattggctcaaggttctgcagctgtacaggaagcgtggtgccagcatctccttctggggaggcctcagagagcttttacttatggcaaaaggatgcaggccagagaaggggagcgagagagagtaagaaggggaggtgccacacacttaaacaaccagatctggcaaggactcactcatcattgcaaggacagcaccaagtcatgaaggatctgcccccataacccaaacaccttccaccaggtcgcatctccaacactgggaattacatttcaacatgagatttgggcgggggacaaatatccaaactatgtcacggagcaagaggaggtccctggagctgttgaagcagaaatggggtgaagaatagaggtggagggtgcttaggcttccaaggtctcttctaggtgtgagatggagggattctgcgaccaagtcacctggagagtgactcaacaaggtgactgctttcccaagcacgagccctcgggggacagacgggggctgaaaactggcacacattcttcctggatcctttgacatgtgatcattcaaagataacagttcaaagataacaaagggattgaagctttaccaatccctttcttattgtggcattttctctattaaaaataaatactcatttatactataacttacagaatcagtaccaattctgaaagtatacaaagcgttgccttactttaaggaaggagaccactactactcctgctgccctcctcccccgaccttgcctagttcacaagacaggaggaaagagagaaagcaaaaagttggaaagaaacagaagtaagataaatagccagtcaaccttggcaccaccacccagccctaggagttaaaaaaagtaataataataacagcaacccctgacctaaactacttgtgttatctgtaagttccagacattatatgaaaaagcattgcaaaactttctgttctgttacctgatgcatgtagcccccagtcacgtttcccacgcttgctcgatttatcacgaccctttcatgtggacccctcgaagttgtaagcctttaaaaaggccaagaattggccaggcgtggtggctcatgcctgtaatcccagcactttggggggcgggcggatcacgaggtcaggagatcgagaccatcctggctaacacagtgaaaccccatctctactaaaaatacaaaaaaattagccgggtgtggtggtgggtgactgtagtcccagctactcgggaggcggaggcaggagaatggcatgaagtcgggaggcagagcttgcagtgagccgagattgcaccactgcactccagcctgggcaacagagggagactccaaaaaaaaaaaaaaaggccaagaatttatttttcagggagctcggctcttaagacgcaagtctgctgaggctcccggccaaataaacctcttccttctttaatccagtatctgaggagttttgtctgcagctcatcctgctacaacttcatgtcacacctggaaagcttacataggccaggggtggtggctcacgtctgtaatcccagtactctgggaggccgaggtgggcagatcacctgaggttaggagttcaagaccagcctggtcaacacggcgaaaccccgtctctactaaaaatacaaaaattagccaggtgtggtggcaggtgcctgtaatcctagctgctcaggggagactgaggcatgagaatcgcttgaacctgggagagggaggttgcagtgagctgagatcacgtcactgcactccagcctgggggatagagagaggctctgtctccaaaaaaaaaatacaaaaaattagccaggcatggtagcttatgcctgtaatcccagctacctgggaggctgtggtaggagaatcacttgaacccaggaggaggaggttgcagggagccaagattgtgccattgcactccagcctgggcaaaaagagcaaaagtctgtcaaaaagggaagggaaggggaggggaagggaggggaggggagggaagggaaggttacatagatgtgaaagtgaactgccagccatgagcaacaaatccgagtgacatgtcttcttcatggtcctgacacggacgcgtgggttcgatctgacagcagcctgtgccatcatagctactgctcatgcatgcattcggggtgcccaaagtgatgctgaggggggcattcctagattcaaccctccaggagaccatgaggaggctggtgcgatagcgcaatcagatgaagacgcctgggctgcacaggggccactgcaagtgaagactcaagaggccaagctgactcccagaggctagggccactaaggtgggtgccgaggcaggggccaggctgggaacatgagaggccatttgggtagggagataagttccgtgagtgagggccaagggtctgacctcctagtgtggctggagaagcagagacaacagagtgcaaaaagagaaatgggccaggcgaggccatctggcaacgcactgcccaccctccattgcgtgcctctggctgcaaaaacaggcaggatcttccggccggtttgcccgccactcaccttccgagcatgcgcaccctccgagattgccaggaattgacttctctgtggccaatgaggtgccgcgttcctccaggctcatccaatgaacttatccgatgcttttgcatccaccaatggggtttcgagtgctgtgtggccaggctggcccggccttgcgtcgtaagagaatgccaagcccggggagaaggcgttccgggcctcaactttggcgtcgtgagattcttgtgaggcgtctgcctggaagccggcagcaattttgcttctttaaagagaaaaagaaggctagggactcagattcctggattctgaggaaagagaaggctggggacccagatcctggctctgaggggaacgagggttgggggcctgggctcccgggcctgagagggaggggaccagaatggtgtgtcccgcaggaaaaggtggttggaacccagactcctcgatccctacataggacggggctgggctctcagaatcccgggttctgatgaggctggggctggggctgggggccgagattctgggtccctgagagaatgtaagggacccctgagactgagggagaagcggccttcagggccacactcctgatcctgaagttggagggcactgggtggccgggcctgagaattaaaaccatgaaaaactggggcgtgataaacctgtgaactcgctccagctcacaagccggttagggacagaacgactttagaagtcgtggtcatatacaccataaaccccactgtgaggccgggcatcagggctcactcctggaatcccagcactatggggggacgaggcgggcagatcacctgagatcaggagttcgagaccagcctgaccaacatggtgaaacgtcatctctactaaaaatacaaaaaattcactgggtgtggtggcgggcacctgtaatcccggctactcgggaggctgaggcaggagaattgcttgaacctgataggcagaggcagtgagccgagattgcgccactgcactccagcctgggcgacagtgcaagactccgtctcaaaaaaaaaaaaaatgcagattaaaacaccccaccctgaagtcagtacttgccaggacctagatttgatctcatgcactctggctgaaaagttaattgccttctctccatcaaattcacagatccagaccagctcctcccagacctctccagaagaagccatgggaacccctcgtatccagcatttgctgatcctcctggtcctaggagcctccctcctgacctgtgcgtatgggggacataggggagagccgtgtgtcacagaaggtggactgatgatgaaaagggagccgccttggcccatggagaagtgcttatccttttcttgttttctcctcagcgggcctagagctgtattgtcaaaagggtctgtccatgactgtggaagcagatccagccaatatgtttaactggaccacagaggaagtggagacttgtgacaaaggggcactttgccaggaaaccatactaataattaaagcaggtgaaatgagatggggcatttgggctgggtaggagggaggttgattatctccatgccaatgcttgttcccttcgtccaggccaattgtgacggccaccatccatttcccctccttcctgtctcataacagggactgagacagccattttggccacgaagggctgcatcccggaaggggaggaggccataacaattgtccagcactcttcacctcccggcctgatcgtgacctcctacagtaactactgtgaggattccttctgtaatgacaaagacagcctgtctcagttttgggagttcagtgagaccacaggtaccctggaagtgggggagataggtactaagagaaactccataaagagcttgtgtatggcctccctttgcattctgacttggcttagcctaagtggtccataccccaaagtacctcacagttcaagtaattttatgtttctgaattgttcattgggatctaaacactgctcagagcagcgagataccagtgaagcctggagtgtaaactgggttttgtgtttattaagcaataagacaggctgggtgaggtggatcgcctgaggtcaggggtttgggaccagcttggccaacatggtgaaaacctgtctctactaaaaatacaaaaattagcttagcctggtggcgcacacctgtaatcccagatactcgggaagctgaggcaggagaattgcttgaacccaggaggcagaggttgcagtgagccaatatcacaccactgcacttcagcctgggacagagagcaagactccatcaaaaaaaaaaaaaaaaaaagcaataagacatcagtgtaggtttccgaacagggtggtattatcagtctaacaagtattggtttcccactgctgcacgagaacggcccagttccccaatttacaaggcctgtagtaacttggcccttcctgtcttttcagcttcatttccctctcttccctctctcatttactgtgtgctaactggggctaatactcaaaatgcttaacaatgtagatggcactggccaatcaaaatggattctggccataaaaaacaaaaacaaaaacaaaaaaaacagatcaaagaaacagctgggcctacaagctgaatatgagtcgtgcaacttctcacaattccctgaatccaccaagctggctcacaccacctgacctttgtccttgctgtttcctttactaccctccccaccccattttcacatagctaacccctgttcatcctccatgtcaattcaggtatcagctctttgaaaatatttgccaaattcttttaggtagttgggtattcctccattcctttgtcattataccttgaacacagcagctactgaattgattacttacatgtctttctcctaggcagagatgccaggtgacaggaactatgtccttttcatctctgtatcttcacacctcagcagagtttggaagtcagatcgatggagatttcacagcagagaacaccagctggggaaggatggggaggctgaagtaatgggccttgattagagtggcatctgcaggaaaatcttggggaagagaaggcagcaaggagcaacatctctggaggcaggacctgcccttaactgtctctctcatttccctccagcttccactgtgtcaacaaccctccattgtccaacctgtgtggctttggggacctgtttcagtgctccttctcttccctgtcccaatggtacaactcgatgctatcaaggaaaacttgagatcactggaggtaaactgaaatgaacatctgatagtttcagaggctggaaaaccatttgagtggctccccagagattctgacactgagctctccagggatgaggggggactggattctcctctgatgtcctaaaacatctctgtctctcccgatccttccttgttctataggtggcattgagtcgtctgtggaggtcaaaggctgtacagccatgattggctgcaggctgatgtctggaatcttagcagtaggacccatgtttgtgagggaagcgtgcccacatcagctgctcactcaacctcgaaagactgaaaatggggccacctgtcttcccattcctgtttgggggttacagctactgctgccattgctgctgccatcatttattcacttttcctaagaaggcacttctgggcctgggtctgaggacatcttttttgactgggagccttcttactgttgaggttcaacaagctgaggagtagatgggaatttgagggagaatacagagatactatgaacgtatttgacatttttaatacaatttctgctataatttttgtatgcagtaggcgttactaataaacatttctgctgtgatttgtgtatgtttcaacactagaagtggaattttagtgctgaaagagcctttaaaattcatcttctccaaaccacacattctccagaaagagaatctgagatctggaaaatttcagtgagtttcttacatttagctatggccagagccaaggcaagaacttacatattttgacgtaaagtctgattttcctttcactctaatatgctagctctccttgctagcagaagtaactagcattagcctcctccagaacactcccagcccaatcttaaggctgctgttttggggttctaaaatttccctaggaagtatggccaaatgagaaaaatcagactccaaattctccagttatgggcctgctgtagtggcttatacctgtaatcccagcactttgagaggcagaggtgggaggattgcatgagccaaggagtttgagaccagcctgggcaacctaatgagactacatctctacaaaaaaaaataatccaaaaattagcctggcatggtggcgctcgcctgtagtcccagctacttgggaggctgaagtgggatgatcacttatgtccacaaaaagagtcaaactctgtaaaatatttgaaaagatttattctgaaccaaatgtgagtgaccgtggtgtgtgacacagccctcaggagaccctgaaaacgtgcctaaggtggtcggggcacagcctagttttataccgtttaggaagacatgaggcaatcaaatacatgtaagatgtacattgtttcagtccagaaaggcaggacaactccaagtggaggaaacttccaggttataggtagattcaaaaattttctgattggccattggttaaaagagttattatctaaagacctggaatcagtagaaaggaatgtctgggttacgatgataagggattgtggaaaccaaagttttattacacaaatgaagccaccatgtcgcaggcttcagagagaatacattgtaaatgtttatcagacttaaggtctgtgttgatgttcatgctggtcagcttttcccaaaatccaaaagggaggcgggtatattgaggcatggccgactctcccttcccacagcatggcctgaaccagtttttcaggttaactttggaaagccctggctgagaggaggggacccttcagatggttgggggcggggagtggcttataattttattttttgtctgcacttgagctcaggaggttgaggctgcagtgagccatgatcatgcctctgtacttcagactggatgacagagtgagatcctctatcaaaacaaaaggcaaattctctcattacagtgggccccatttctctgtgtcctgtctatcccttgcctgctctacatcattccttcccttccctggggctgacttaatgactcttcagtggacttgggagggagggaggaaggattcattacagtatggtgaatggggacctgtgactacttgggcggcaaagatttttggaaaattctcatgcttattattactcaaaaatacataagctctatcttattgtaaaagactcaaatgatatcagaggtgtatagagcaaagtaaaaggtggggagggtaaaagggagacagatattttcttctaaaaaaaaaaaaaaaaacagctttactaagacttatctgacacacagtaaacggcaccagaggtggaaggagagacttttattacaaacacttgttcccctctcaaaagactggggagtttggccatagtatatatattccaaccaagttctttctagaaagttctctggttctacccactgagaaagggaaaaaaaaaatcttgggataccaaactcactatgctaaagggaaaagtcaggcttggga
